(19) United States
(12) Patent Application Publication
(10) Pub. No.: US 2005/0159381 A1
(43) Pub. Date: Jul. 21, 2005

(54) RNA interference mediated inhibition of chromosome translocation gene expression using short interfering nucleic acid (siNA)

(75) Inventors: James McSwiggen, Boulder, CO (US); Leonid Beigelman, Longmont, CO (US); Bharat M. Chowrira, Louisville, CO (US)

Correspondence Address: MCDONNELL BOEHNEN HULBERT & BERGHOFF LLP, 300 S. WACKER DRIVE, 32ND FLOOR, CHICAGO, IL, 60606, US

(73) Assignee: Sirna Therapeutics, Inc., Boulder, CO (US)

(21) Appl. No.: 10/923,522

(22) Filed: Aug. 20, 2004

Related U.S. Application Data
(63) Continuation-in-part of application No. PCT/US03/05234, filed on Feb. 20, 2003.
(63) Continuation-in-part of application No. PCT/US04/16390, filed on May 24, 2004.
Application No. PCT/US04/16390 is a continuation-in-part of application No. 10/826,966, filed on Apr. 16, 2004.
Application No. 10/826,966 is a continuation-in-part of application No. 10/757,803, filed on Jan. 14, 2004.
Application No. 10/757,803 is a continuation-in-part of application No. 10/720,448, filed on Nov. 24, 2003.
Application No. 10/720,448 is a continuation-in-part of application No. 10/693,059, filed on Oct. 23, 2003.
Application No. 10/693,059 is a continuation-in-part of application No. 10/444,853, filed on May 23, 2003.
Application No. 10/444,853 is a continuation-in-part of application No. PCT/US03/05346, filed on Feb. 20, 2003.
Application No. 10/444,853 is a continuation-in-part of application No. PCT/US03/05028, filed on Feb. 20, 2003.
(63) Continuation-in-part of application No. PCT/US04/13456, filed on Apr. 30, 2004.
Application No. PCT/US04/13456 is a continuation-in-part of application No. 10/780,447, filed on Feb. 13, 2004.
Application No. 10/780,447 is a continuation-in-part of application No. 10/427,160, filed on Apr. 30, 2003.
Application No. 10/427,160 is a continuation-in-part of application No. PCT/US02/15876, filed on May 17, 2002.
(63) Continuation-in-part of application No. 10/727,780, filed on Dec. 3, 2003.
(60) Provisional application No. 60/439,922, filed on Jan. 14, 2003.
(60) Provisional application No. 60/404,039, filed on Aug. 15, 2002.
(60) Provisional application No. 60/358,580, filed on Feb. 20, 2002.
(60) Provisional application No. 60/358,580, filed on Feb. 20, 2002.
(60) Provisional application No. 60/363,124, filed on Mar. 11, 2002.
(60) Provisional application No. 60/363,124, filed on Mar. 11, 2002.
(60) Provisional application No. 60/386,782, filed on Jun. 6, 2002.
(60) Provisional application No. 60/386,782, filed on Jun. 6, 2002.
(60) Provisional application No. 60/406,784, filed on Aug. 29, 2002.
(60) Provisional application No. 60/406,784, filed on Aug. 29, 2002.
(60) Provisional application No. 60/408,378, filed on Sep. 5, 2002.
(60) Provisional application No. 60/408,378, filed on Sep. 5, 2002.
(60) Provisional application No. 60/409,293, filed on Sep. 9, 2002.
(60) Provisional application No. 60/409,293, filed on Sep. 9, 2002.
(60) Provisional application No. 60/440,129, filed on Jan. 15, 2003.
(60) Provisional application No. 60/440,129, filed on Jan. 15, 2003.
(60) Provisional application No. 60/292,217, filed on May 18, 2001.
(60) Provisional application No. 60/362,016, filed on Mar. 6, 2002.
(60) Provisional application No. 60/306,883, filed on Jul. 20, 2001.
(60) Provisional application No. 60/311,865, filed on Aug. 13, 2001.
(60) Provisional application No. 60/543,480, filed on Feb. 10, 2004.

(51) Int. Cl. A61K 48/00; C07H 21/02

(52) U.S. Cl. 514/44; 536/23.1

(57) ABSTRACT

This invention relates to compounds, compositions, and methods useful for modulating chromosomal translocation gene expression using short interfering nucleic acid (siNA) molecules. This invention also relates to compounds, compositions, and methods useful for modulating the expression and activity of other genes involved in pathways of chromosomal translocation gene expression and/or activity by RNA interference (RNAi) using small nucleic acid molecules. In particular, the instant invention features small nucleic acid molecules, such as short interfering nucleic acid (siNA), short interfering RNA (siRNA), double-stranded RNA (dsRNA), micro-RNA (mRNA), and short hairpin RNA (shRNA) molecules and methods used to modulate the expression of BCR-ABL, ERG, EWS-ERG, TEL-AML1, EWS-FLI1, TLS-FUS, PAX3-FKHR, and/or AML1-ETO fusion genes.

[0001] This application is a continuation-in-part of International Patent Application No. PCT/US03/05234 filed Feb. 20, 2003, which claims the benefit of U.S. Provisional Application No. 60/439,922 filed Jan. 14, 2003 and U.S. Provisional Application No. 60/404,039 filed Aug. 15, 2002. This application is also a continuation-in-part of International Patent Application No. PCT/US04/16390 filed May 24, 2004, which is a continuation-in-part of U.S. patent application Ser. No. 10/826,966 filed Apr. 16, 2004, which is continuation-in-part of U.S. patent application Ser. No. 10/757,803 filed Jan. 14, 2004, which is a continuation-in-part of U.S. patent application Ser. No. 10/720,448 filed Nov. 24, 2003, which is a continuation-in-part of U.S. patent application Ser. No. 10/693,059 filed Oct. 23, 2003, which is a continuation-in-part of U.S. patent application Ser. No. 10/444,853 filed May 23, 2003, which is a continuation-in-part of International Patent Application No. PCT/US03/05346 filed Feb. 20, 2003, and a continuation-in-part of International Patent Application No. PCT/US03/05028 filed Feb. 20, 2003, both of which claim the benefit of U.S. Provisional Application No. 60/358,580 filed Feb. 20, 2002, U.S. Provisional Application No. 60/363,124 filed Mar. 11, 2002, U.S. Provisional Application No. 60/386,782 filed Jun. 6, 2002, U.S. Provisional Application No. 60/406,784 filed Aug. 29, 2002, U.S. Provisional Application No. 60/408,378 filed Sep. 5, 2002, U.S. Provisional Application No. 60/409,293 filed Sep. 9, 2002, and U.S. Provisional Application No. 60/440,129 filed Jan. 15, 2003. This application is also a continuation-in-part of International Patent Application No. PCT/US04/13456 filed Apr. 30, 2004, which is a continuation-in-part of U.S. patent application Ser. No. 10/780,447 filed Feb. 13, 2004, which is a continuation-in-part of U.S. patent application Ser. No. 10/427,160 filed Apr. 30, 2003, which is a continuation-in-part of International Patent Application No. PCT/US02/15876 filed May 17, 2002, which claims the benefit of U.S. Provisional Application No. 60/292,217 filed May 18, 2001, U.S. Provisional Application No. 60/362,016 filed Mar. 6, 2002, U.S. Provisional Application No. 60/306,883 filed Jul. 20, 2001, and U.S. Provisional Application No. 60/311,865 filed Aug. 13, 2001. This application is also a continuation-in-part of U.S. patent application Ser. No. 10/727,780 filed Dec. 3, 2003. This application also claims the benefit of U.S. Provisional Application No. 60/543,480 filed Feb. 10, 2004.

[0002] The instant application claims the benefit of all the listed applications, which are hereby incorporated by reference herein in their entireties, including the drawings.

### FIELD OF THE INVENTION

[0003] The present invention relates to compounds, compositions, and methods for the study, diagnosis, and treatment of traits, diseases and conditions that respond to the modulation of fusion gene expression and/or activity. The present invention is also directed to compounds, compositions, and methods relating to traits, diseases and conditions that respond to the modulation of expression and/or activity of genes involved in fusion gene (e.g., BCR-ABL, and EWS-ERG) expression pathways or other cellular processes that mediate the maintenance or development of such traits, diseases and conditions. Specifically, the invention relates to small nucleic acid molecules, such as short interfering nucleic acid (siNA), short interfering RNA (siRNA), double-stranded RNA (dsRNA), micro-RNA (mRNA), and short hairpin RNA (shRNA) molecules capable of mediating RNA interference (RNAi) against fusion gene expression. Such small nucleic acid molecules are useful, for example, in providing compositions for treatment of traits, diseases and conditions that can respond to modulation of fusion gene expression in a subject, such as a broad spectrum of oncology and neovascularization-related indications, including but not limited to cancer, such as leukemias including acute myeloid leukemia (AML) and chronic myeloid leukemia (CML), cancers of the lung, colon, breast, prostate, cervix, lymphoma, Ewing's sarcoma and related tumors, melanoma, angiogenic disease states such as tumor angiogenesis, diabetic retinopathy, macular degeneration, neovascular glaucoma, myopic degeneration, inflammatory conditions such as arthritis, e.g., rheumatoid arthritis, psoriasis, verruca vulgaris, angiofibroma of tuberous sclerosis, port-wine stains, Sturge Weber syndrome, Kippel-Trenaunay-Weber syndrome, Osler-Weber-rendu syndrome, osteoporosis, wound healing and other indications that can respond to the level of BCR-ABL and/or ERG.

### BACKGROUND OF THE INVENTION

[0004] The following is a discussion of relevant art pertaining to RNAi. The discussion is provided only for understanding of the invention that follows. The summary is not an admission that any of the work described below is prior art to the claimed invention.

[0005] RNA interference refers to the process of sequence-specific post-transcriptional gene silencing in animals mediated by short interfering RNAs (siRNAs) (Zamore et al., 2000, Cell, 101, 25-33; Fire et al., 1998, Nature, 391, 806; Hamilton et al., 1999, Science, 286, 950-951; Lin et al., 1999, Nature, 402, 128-129; Sharp, 1999, Genes & Dev., 13: 139-141; and Strauss, 1999, Science, 286, 886). The corresponding process in plants (Heifetz et al., International PCT Publication No. WO 99/61631) is commonly referred to as post-transcriptional gene silencing or RNA silencing and is also referred to as quelling in fungi. The process of post-transcriptional gene silencing is thought to be an evolutionarily-conserved cellular defense mechanism used to prevent the expression of foreign genes and is commonly shared by diverse flora and phyla (Fire et al., 1999, Trends Genet., 15, 358). Such protection from foreign gene expression may have evolved in response to the production of double-stranded RNAs (dsRNAs) derived from viral infection or from the random integration of transposon elements into a host genome via a cellular response that specifically destroys homologous single-stranded RNA or viral genomic RNA. The presence of dsRNA in cells triggers the RNAi response through a mechanism that has yet to be fully characterized. This mechanism appears to be different from other known mechanisms involving double stranded RNA-specific ribonucleases, such as the interferon response that results from dsRNA-mediated activation of protein kinase PKR and 2′,5′-oligoadenylate synthetase resulting in non-specific cleavage of mRNA by ribonuclease L (see for example U.S. Pat. Nos. 6,107,094; 5,898,031; Clemens et al., 1997, J Interferon & Cytokine Res., 17, 503-524; Adah et al., 2001, Curr. Med. Chem., 8, 1189).

[0006] The presence of long dsRNAs in cells stimulates the activity of a ribonuclease III enzyme referred to as dicer (Bass, 2000, Cell, 101, 235; Zamore et al., 2000, Cell, 101, 25-33; Hammond et al., 2000, Nature, 404, 293). Dicer is involved in the processing of the dsRNA into short pieces of dsRNA known as short interfering RNAs (siRNAs) (Zamore et al., 2000, Cell, 101, 25-33; Bass, 2000, Cell, 101, 235; Berstein et al., 2001, Nature, 409, 363). Short interfering RNAs derived from dicer activity are typically about 21 to about 23 nucleotides in length and comprise about 19 base pair duplexes (Zamore et al., 2000, Cell, 101, 25-33; Elbashir et al., 2001, Genes Dev., 15, 188). Dicer has also been implicated in the excision of 21- and 22-nucleotide small temporal RNAs (stRNAs) from precursor RNA of conserved structure that are implicated in translational control (Hutvagner et al., 2001, Science, 293, 834). The RNAi response also features an endonuclease complex, commonly referred to as an RNA-induced silencing complex (RISC), which mediates cleavage of single-stranded RNA having sequence complementary to the antisense strand of the siRNA duplex. Cleavage of the target RNA takes place in the middle of the region complementary to the antisense strand of the siRNA duplex (Elbashir et al., 2001, Genes Dev., 15, 188).

[0007] RNAi has been studied in a variety of systems. Fire et al., 1998, Nature, 391, 806, were the first to observe RNAi in C. elegans. Bahramian and Zarbl, 1999, Molecular and Cellular Biology, 19, 274-283 and Wianny and Goetz, 1999, Nature Cell Biol., 2, 70, describe RNAi mediated by dsRNA in mammalian systems. Hammond et al., 2000, Nature, 404, 293, describe RNAi in Drosophila cells transfected with dsRNA. Elbashir et al., 2001, Nature, 411, 494 and Tuschl et al., International PCT Publication No. WO 01/75164, describe RNAi induced by introduction of duplexes of synthetic 21-nucleotide RNAs in cultured mammalian cells including human embryonic kidney and HeLa cells. Recent work in Drosophila embryonic lysates (Elbashir et al., 2001, EMBO J., 20, 6877 and Tuschl et al., International PCT Publication No. WO 01/75164) has revealed certain requirements for siRNA length, structure, chemical composition, and sequence that are essential to mediate efficient RNAi activity. These studies have shown that 21-nucleotide siRNA duplexes are most active when containing 3′-terminal dinucleotide overhangs. Furthermore, complete substitution of one or both siRNA strands with 2′-deoxy (2′-H) or 2′-O-methyl nucleotides abolishes RNAi activity, whereas substitution of the 3′-terminal siRNA overhang nucleotides with 2′-deoxy nucleotides (2′-H) was shown to be tolerated. Single mismatch sequences in the center of the siRNA duplex were also shown to abolish RNAi activity. In addition, these studies also indicate that the position of the cleavage site in the target RNA is defined by the 5′-end of the siRNA guide sequence rather than the 3′-end of the guide sequence (Elbashir et al., 2001, EMBO J., 20, 6877). Other studies have indicated that a 5′-phosphate on the target-complementary strand of a siRNA duplex is required for siRNA activity and that ATP is utilized to maintain the 5′-phosphate moiety on the siRNA (Nykanen et al., 2001, Cell, 107, 309).

[0008] Studies have shown that replacing the 3′-terminal nucleotide overhanging segments of a 21-mer siRNA duplex having two-nucleotide 3′-overhangs with deoxyribonucleotides does not have an adverse effect on RNAi activity. Replacing up to four nucleotides on each end of the siRNA with deoxyribonucleotides has been reported to be well tolerated, whereas complete substitution with deoxyribonucleotides results in no RNAi activity (Elbashir et al., 2001, EMBO J., 20, 6877 and Tuschl et al., International PCT Publication No. WO 01/75164). In addition, Elbashir et al., supra, also report that substitution of siRNA with 2′-O-methyl nucleotides completely abolishes RNAi activity. Li et al., International PCT Publication No. WO 00/44914, and Beach et al., International PCT Publication No. WO 01/68836 preliminarily suggest that siRNA may include modifications to either the phosphate-sugar backbone or the nucleoside to include at least one of a nitrogen or sulfur heteroatom, however, neither application postulates to what extent such modifications would be tolerated in siRNA molecules, nor provides any further guidance or examples of such modified siRNA. Kreutzer et al., Canadian Patent Application No. 2,359,180, also describe certain chemical modifications for use in dsRNA constructs in order to counteract activation of double-stranded RNA-dependent protein kinase PKR, specifically 2′-amino or 2′-O-methyl nucleotides, and nucleotides containing a 2′-O or 4′-C methylene bridge. However, Kreutzer et al. similarly fails to provide examples or guidance as to what extent these modifications would be tolerated in dsRNA molecules.

[0009] Parrish et al., 2000, Molecular Cell, 6, 1077-1087, tested certain chemical modifications targeting the unc-22 gene in C. elegans using long (>25 nt) siRNA transcripts. The authors describe the introduction of thiophosphate residues into these siRNA transcripts by incorporating thiophosphate nucleotide analogs with T7 and T3 RNA polymerase and observed that RNAs with two phosphorothioate modified bases also had substantial decreases in effectiveness as RNAi. Further, Parrish et al. reported that phosphorothioate modification of more than two residues greatly destabilized the RNAs in vitro such that interference activities could not be assayed. Id. at 1081. The authors also tested certain modifications at the 2′-position of the nucleotide sugar in the long siRNA transcripts and found that substituting deoxynucleotides for ribonucleotides produced a substantial decrease in interference activity, especially in the case of Uridine to Thymidine and/or Cytidine to deoxy-Cytidine substitutions. Id. In addition, the authors tested certain base modifications, including substituting, in sense and antisense strands of the siRNA, 4-thiouracil, 5-bromouracil, 5-iodouracil, and 3-(aminoallyl)uracil for uracil, and inosine for guanosine. Whereas 4-thiouracil and 5-bromouracil substitution appeared to be tolerated, Parrish reported that inosine produced a substantial decrease in interference activity when incorporated in either strand. Parrish also reported that incorporation of 5-iodouracil and 3-(aminoallyl)uracil in the antisense strand resulted in a substantial decrease in RNAi activity as well.

[0010] The use of longer dsRNA has been described. For example, Beach et al., International PCT Publication No. WO 01/68836, describes specific methods for attenuating gene expression using endogenously-derived dsRNA. Tuschl et al., International PCT Publication No. WO 01/75164, describe a Drosophila in vitro RNAi system and the use of specific siRNA molecules for certain functional genomic and certain therapeutic applications; although Tuschl, 2001, Chem. Biochem., 2, 239-245, doubts that RNAi can be used to cure genetic diseases or viral infection due to the danger of activating interferon response. Li et al., International PCT Publication No. WO 00/44914, describe the use of specific long (141 bp-488 bp) enzymatically synthesized or vector expressed dsRNAs for attenuating the expression of certain target genes. Zernicka-Goetz et al., International PCT Publication No. WO 01/36646, describe certain methods for inhibiting the expression of particular genes in mammalian cells using certain long (550 bp-714 bp), enzymatically synthesized or vector expressed dsRNA molecules. Fire et al., International PCT Publication No. WO 99/32619, describe particular methods for introducing certain long dsRNA molecules into cells for use in inhibiting gene expression in nematodes. Plaetinck et al., International PCT Publication No. WO 00/01846, describe certain methods for identifying specific genes responsible for conferring a particular phenotype in a cell using specific long dsRNA molecules. Mello et al., International PCT Publication No. WO 01/29058, describe the identification of specific genes involved in dsRNA-mediated RNAi. Pachuck et al., International PCT Publication No. WO 00/63364, describe certain long (at least 200 nucleotide) dsRNA constructs. Deschamps Depaillette et al., International PCT Publication No. WO 99/07409, describe specific compositions consisting of particular dsRNA molecules combined with certain anti-viral agents. Waterhouse et al., International PCT Publication No. 99/53050 and 1998, PNAS, 95, 13959-13964, describe certain methods for decreasing the phenotypic expression of a nucleic acid in plant cells using certain dsRNAs. Driscoll et al., International PCT Publication No. WO 01/49844, describe specific DNA expression constructs for use in facilitating gene silencing in targeted organisms.

[0011] Others have reported on various RNAi and gene-silencing systems. For example, Parrish et al., 2000, Molecular Cell, 6, 1077-1087, describe specific chemically-modified dsRNA constructs targeting the unc-22 gene of C. elegans. Grossniklaus, International PCT Publication No. WO 01/38551, describes certain methods for regulating polycomb gene expression in plants using certain dsRNAs. Churikov et al., International PCT Publication No. WO 01/42443, describe certain methods for modifying genetic characteristics of an organism using certain dsRNAs. Cogoni et al, International PCT Publication No. WO 01/53475, describe certain methods for isolating a Neurospora silencing gene and uses thereof. Reed et al., International PCT Publication No. WO 01/68836, describe certain methods for gene silencing in plants. Honer et al., International PCT Publication No. WO 01/70944, describe certain methods of drug screening using transgenic nematodes as Parkinson's Disease models using certain dsRNAs. Deak et al., International PCT Publication No. WO 01/72774, describe certain Drosophila-derived gene products that may be related to RNAi in Drosophila. Arndt et al., International PCT Publication No. WO 01/92513 describe certain methods for mediating gene suppression by using factors that enhance RNAi. Tuschl et al., International PCT Publication No. WO 02/44321, describe certain synthetic siRNA constructs. Pachuk et al., International PCT Publication No. WO 00/63364, and Satishchandran et al., International PCT Publication No. WO 01/04313, describe certain methods and compositions for inhibiting the function of certain polynucleotide sequences using certain long (over 250 bp), vector expressed dsRNAs. Echeverri et al., International PCT Publication No. WO 02/38805, describe certain C. elegans genes identified via RNAi. Kreutzer et al., International PCT Publications Nos. WO 02/055692, WO 02/055693, and EP 1144623 B1 describes certain methods for inhibiting gene expression using dsRNA. Graham et al., International PCT Publications Nos. WO 99/49029 and WO 01/70949, and AU 4037501 describe certain vector expressed siRNA molecules. Fire et al., U.S. Pat. No. 6,506,559, describe certain methods for inhibiting gene expression in vitro using certain long dsRNA (299 bp-1033 bp) constructs that mediate RNAi. Martinez et al., 2002, Cell, 110, 563-574, describe certain single stranded siRNA constructs, including certain 5′-phosphorylated single stranded siRNAs that mediate RNA interference in Hela cells. Harborth et al., 2003, Antisense & Nucleic Acid Drug Development, 13, 83-105, describe certain chemically and structurally modified siRNA molecules. Chiu and Rana, 2003, RNA, 9, 1034-1048, describe certain chemically and structurally modified siRNA molecules. Woolf et al., International PCT Publication Nos. WO 03/064626 and WO 03/064625 describe certain chemically modified dsRNA constructs.

[0012] Wilda et al., 2002, Oncogene, 21, 5716, describes certain siRNA molecules targeting BCR-ABL RNA in K562 cells. BCR-ABL RNA and protein were down-regulated following siRNA treatment as shown by real-time quantitative PCR and Western blots.

[0013] Jarvis et al., International PCT Publication No. WO 01/88124 describes nucleic acid mediated modulation of Erg expression.

### SUMMARY OF THE INVENTION

[0014] This invention relates to compounds, compositions, and methods useful for modulating gene expression of genes including fusion genes, transcriptional deregulation genes, genes resulting from chromosomal translocation events, for example expression of gene(s) encoding proteins associated with chromosomal translocation events, such as BCR-ABL, TEL-AML1, EWS-FLI1, TLS-FUS, PAX3-FKHR, EWS-ERG, FUS/ERG, TLS/ERG and AML1-ETO fusion proteins, using short interfering nucleic acid (siNA) molecules. This invention also relates to compounds, compositions, and methods useful for modulating the expression and activity of other genes involved in pathways of chromosomal translocation events, fusion genes, and/or transcriptional deregulation genes (e.g., BCR-ABL and/or ERG) and/or activity by RNA interference (RNAi) using small nucleic acid molecules. In particular, the instant invention features small nucleic acid molecules, such as short interfering nucleic acid (siNA), short interfering RNA (siRNA), double-stranded RNA (dsRNA), micro-RNA (mRNA), and short hairpin RNA (shRNA) molecules and methods used to modulate the expression of BCR-ABL and/or ERG genes.

[0015] A siNA of the invention can be unmodified or chemically-modified. A siNA of the instant invention can be chemically synthesized, expressed from a vector or enzymatically synthesized. The instant invention also features various chemically-modified synthetic short interfering nucleic acid (siNA) molecules capable of modulating BCR-ABL and ERG gene expression or activity in cells by RNA interference (RNAi). The use of chemically-modified siNA improves various properties of native siNA molecules through increased resistance to nuclease degradation in vivo and/or through improved cellular uptake. Further, contrary to earlier published studies, siNA having multiple chemical modifications retains its RNAi activity. The siNA molecules of the instant invention provide useful reagents and methods for a variety of therapeutic, diagnostic, target validation, genomic discovery, genetic engineering, and pharmacogenomic applications.

[0016] In one embodiment, the invention features one or more siNA molecules and methods that independently or in combination modulate the expression of gene(s) encoding proteins associated with chromosomal translocation events, such as BCR-ABL, TEL-AML1, EWS-FLIl, TLS-FUS, PAX3-FKHR, EWS-ERG, FUS/ERG, TLS/ERG and AMLl-ETO fusion proteins associated with the maintenance and/or development of cancer, such as leukemias including acute myeloid leukemia (AML) and chronic myeloid leukemia (CML), cancers of the lung, colon, breast, prostate, cervix, lymphoma, Ewing'$ sarcoma and related tumors, melanoma, angiogenic disease states such as tumor angiogenesis, diabetic retinopathy, macular degeneration, neovascular glaucoma, myopic degeneration, inflammatory conditions such as arthritis, e.g., rheumatoid arthritis, psoriasis, verruca vulgaris, angiofibroma of tuberous sclerosis, port-wine stains, Sturge Weber syndrome, Kippel-Trenaunay-Weber syndrome, Osler-Weber-rendu syndrome, osteoporosis, and wound healing, such as genes encoding sequences comprising those sequences referred to by GenBank Accession Nos. shown in Table I, referred to herein generally as fusion genes, including BCR-ABL, and/or ERG. The description below of the various aspects and embodiments of the invention is provided with reference to exemplary BCR-ABL gene referred to herein as BCR-ABL. However, the various aspects and embodiments are also directed to other other chromosomal translocation genes, such as TEL-AML1, EWS-FLI1, TLS-FUS, PAX3-FKHR, EWS-ERG, FUS/ERG, TLS/ERG and AML1-ETO and any other fusion gene or transcriptional deregulation genes, such as fusion or transcriptional deregulation homolog genes and transcript variants, polymorphisms (e.g., single nucleotide polymorphism, (SNPs)) associated with certain fusion or transcriptional deregulation genes, and fusion or transcriptional deregulation genes. As such, the various aspects and embodiments are also directed to other genes that are involved in fusion or transcriptional deregulation gene mediated pathways of signal transduction or gene expression. These additional genes can be analyzed for target sites using the methods described for BCR-ABL and ERG genes herein. Thus, the modulation of other genes and the effects of such modulation of the other genes can be performed, determined, and measured as described herein.

[0017] In one embodiment, the invention features a double-stranded short interfering nucleic acid (siNA) molecule that down-regulates expression of a BCR-ABL and/or ERG gene, wherein said siNA molecule comprises about 15 to about 28 base pairs.

[0018] In one embodiment, the invention features a double stranded short interfering nucleic acid (siNA) molecule that directs cleavage of a BCR-ABL and/or ERG RNA via RNA interference (RNAi), wherein the double stranded siNA molecule comprises a first and a second strand, each strand of the siNA molecule is about 18 to about 28 nucleotides in length, the first strand of the siNA molecule comprises nucleotide sequence having sufficient complementarity to the BCR-ABL and/or ERG RNA for the siNA molecule to direct cleavage of the BCR-ABL and/or ERG RNA via RNA interference, and the second strand of said siNA molecule comprises nucleotide sequence that is complementary to the first strand.

[0019] In one embodiment, the invention features a double stranded short interfering nucleic acid (siNA) molecule that directs cleavage of a BCR-ABL and/or ERG RNA via RNA interference (RNAi), wherein the double stranded siNA molecule comprises a first and a second strand, each strand of the siNA molecule is about 18 to about 23 nucleotides in length, the first strand of the siNA molecule comprises nucleotide sequence having sufficient complementarity to the BCR-ABL and/or ERG RNA for the siNA molecule to direct cleavage of the BCR-ABL and/or ERG RNA via RNA interference, and the second strand of said siNA molecule comprises nucleotide sequence that is complementary to the first strand.

[0020] In one embodiment, the invention features a chemically synthesized double stranded short interfering nucleic acid (siNA) molecule that directs cleavage of a BCR-ABL and/or ERG RNA via RNA interference (RNAi), wherein each strand of the siNA molecule is about 18 to about 28 nucleotides in length; and one strand of the siNA molecule comprises nucleotide sequence having sufficient complementarity to the BCR-ABL and/or ERG RNA for the siNA molecule to direct cleavage of the BCR-ABL and/or ERG RNA via RNA interference.

[0021] In one embodiment, the invention features a chemically synthesized double stranded short interfering nucleic acid (siNA) molecule that directs cleavage of a BCR-ABL and/or ERG RNA via RNA interference (RNAi), wherein each strand of the siNA molecule is about 18 to about 23 nucleotides in length; and one strand of the siNA molecule comprises nucleotide sequence having sufficient complementarity to the BCR-ABL and/or ERG RNA for the siNA molecule to direct cleavage of the BCR-ABL and/or ERG RNA via RNA interference.

[0022] In one embodiment, the invention features a siNA molecule that down-regulates expression of a BCR-ABL and/or ERG gene, for example, wherein the BCR-ABL and/or ERG gene comprises BCR-ABL and/or ERG encoding sequence. In one embodiment, the invention features a siNA molecule that down-regulates expression of a BCR-ABL and/or ERG gene, for example, wherein the BCR-ABL and/or ERG gene comprises BCR-ABL and/or ERG non-coding sequence or regulatory elements involved in BCR-ABL and/or ERG gene expression.

[0023] In one embodiment, a siNA of the invention is used to inhibit the expression of BCR-ABL and/or ERG genes or a BCR-ABL and/or ERG gene family, wherein the genes or gene family sequences share sequence homology. Such homologous sequences can be identified as is known in the art, for example using sequence alignments. siNA molecules can be designed to target such homologous sequences, for example using perfectly complementary sequences or by incorporating non-canonical base pairs, for example mismatches and/or wobble base pairs, that can provide additional target sequences. In instances where mismatches are identified, non-canonical base pairs (for example, mismatches and/or wobble bases) can be used to generate siNA molecules that target more than one gene sequence. In a non-limiting example, non-canonical base pairs such as UU and CC base pairs are used to generate siNA molecules that are capable of targeting sequences for differing BCR-ABL and/or ERG targets that share sequence homology. As such, one advantage of using siNAs of the invention is that a single siNA can be designed to include nucleic acid sequence that is complementary to the nucleotide sequence that is conserved between the homologous genes. In this approach, a single siNA can be used to inhibit expression of more than one gene instead of using more than one siNA molecule to target the different genes.

[0024] In one embodiment, the invention features a siNA molecule having RNAi activity against BCR-ABL and/or ERG RNA, wherein the siNA molecule comprises a sequence complementary to any RNA having BCR-ABL and/or ERG encoding sequence, such as those sequences having GenBank Accession Nos. shown in Table I. In another embodiment, the invention features a siNA molecule having RNAi activity against BCR-ABL and/or ERG RNA, wherein the siNA molecule comprises a sequence complementary to an RNA having variant BCR-ABL and/or ERG encoding sequence, for example other mutant BCR-ABL and/or ERG genes not shown in Table I but known in the art to be associated with the maintenance and/or development of cancer, such as leukemias including acute myeloid leukemia (AML) and chronic myeloid leukemia (CML), cancers of the lung, colon, breast, prostate, cervix, lymphoma, Ewing's sarcoma and related tumors, melanoma, angiogenic disease states such as tumor angiogenesis, diabetic retinopathy, macular degeneration, neovascular glaucoma, myopic degeneration, arthritis such as rheumatoid arthritis, psoriasis, verruca vulgaris, angiofibroma of tuberous sclerosis, port-wine stains, Sturge Weber syndrome, Kippel-Trenaunay-Weber syndrome, Osler-Weber-rendu syndrome, osteoporosis, and/or wound healing. Chemical modifications as shown in Tables III and IV or otherwise described herein can be applied to any siNA construct of the invention. In another embodiment, a siNA molecule of the invention includes a nucleotide sequence that can interact with nucleotide sequence of a BCR-ABL and/or ERG gene and thereby mediate silencing of BCR-ABL and/or ERG gene expression, for example, wherein the siNA mediates regulation of BCR-ABL and/or ERG gene expression by cellular processes that modulate the chromatin structure or methylation patterns of the BCR-ABL and/or ERG gene and prevent transcription of the BCR-ABL and/or ERG gene.

[0025] In one embodiment, siNA molecules of the invention are used to down regulate or inhibit the expression of BCR-ABL and/or ERG proteins arising from BCR-ABL and/or ERG haplotype polymorphisms that are associated with a disease or condition, (e.g., cancer, such as leukemias including acute myeloid leukemia (AML) and chronic myeloid leukemia (CML), cancers of the lung, colon, breast, prostate, cervix, lymphoma, Ewing's sarcoma and related tumors, melanoma, angiogenic disease states such as tumor angiogenesis, diabetic retinopathy, macular degeneration, neovascular glaucoma, myopic degeneration, arthritis such as rheumatoid arthritis, psoriasis, verruca vulgaris, angiofibroma of tuberous sclerosis, port-wine stains, Sturge Weber syndrome, Kippel-Trenaunay-Weber syndrome, Osler-Weber-rendu syndrome, osteoporosis, and wound healing). Analysis of BCR-ABL and/or ERG genes, or BCR-ABL and/or ERG protein or RNA levels can be used to identify subjects with such polymorphisms or those subjects who are at risk of developing traits, conditions, or diseases described herein. These subjects are amenable to treatment, for example, treatment with siNA molecules of the invention and any other composition useful in treating diseases related to BCR-ABL and/or ERG gene expression. As such, analysis of BCR-ABL and/or ERG protein or RNA levels can be used to determine treatment type and the course of therapy in treating a subject. Monitoring of BCR-ABL and/or ERG protein or RNA levels can be used to predict treatment outcome and to determine the efficacy of compounds and compositions that modulate the level and/or activity of certain BCR-ABL and/or ERG proteins associated with a trait, condition, or disease.

[0026] In one embodiment of the invention a siNA molecule comprises an antisense strand comprising a nucleotide sequence that is complementary to a nucleotide sequence or a portion thereof encoding a BCR-ABL and/or ERG protein. The siNA further comprises a sense strand, wherein said sense strand comprises a nucleotide sequence of a BCR-ABL and/or ERG gene or a portion thereof.

[0027] In another embodiment, a siNA molecule comprises an antisense region comprising a nucleotide sequence that is complementary to a nucleotide sequence encoding a BCR-ABL and/or ERG protein or a portion thereof. The siNA molecule further comprises a sense region, wherein said sense region comprises a nucleotide sequence of a BCR-ABL and/or ERG gene or a portion thereof.

[0028] In another embodiment, the invention features a siNA molecule comprising a nucleotide sequence in the antisense region of the siNA molecule that is complementary to a nucleotide sequence or portion of sequence of a BCR-ABL and/or ERG gene. In another embodiment, the invention features a siNA molecule comprising a region, for example, the antisense region of the siNA construct, complementary to a sequence comprising a BCR-ABL and/or ERG gene sequence or a portion thereof.

[0029] In one embodiment, the antisense region of BCR-ABL siNA constructs comprises a sequence complementary to sequence having any of SEQ ID NOs. 1-263, 527-845, 1165-1182, 1201-1218, 1589-1596, 1601-1604, 1609-1612, 1617-1620, 1625-1628, 1633-1636, 1641-1644, 1673, 1675, 1677, 1679, 1680, 1682, 1684, 1686, 1688, or 1689. In one embodiment, the antisense region of BCR-ABL constructs comprises sequence having any of SEQ ID NOs. 264-526, 846-1164, 1183-1200, 1219-1236, 1605-1608, 1613-1616, 1621-1624, 1629-1632, 1637-1640, 1645-1648, 1674, 1676, 1678, 1681, 1683, 1685, 1687, or 1690. In another embodiment, the sense region of BCR-ABL constructs comprises sequence having any of SEQ ID NOs. 1-263, 527-845, 1165-1182, 1201-1218, 1589-1596, 1601-1604, 1609-1612, 1617-1620, 1625-1628, 1633-1636, 1641-1644, 1673, 1675, 1677, 1679, 1680, 1682, 1684, 1686, 1688, or 1689.

[0030] In one embodiment, the antisense region of ERG siNA constructs comprises a sequence complementary to sequence having any of SEQ ID NOs. 1237-1412, 1597-1600, 1649-1652, 1657-1660, 1665-1668, 1673, 1675, 1677, 1679, 1680, 1695-1702, 1707-1710, 1715-1718, 1723-1730, 1739-1746, 1771, 1773, 1775, 1777, or 1778. In one embodiment, the antisense region of ERG constructs comprises sequence having any of SEQ ID NOs. 1413-1588, 1653-1656, 1661-1664, 1669-1672, 1674, 1676, 1678, 1681, 1703-1706, 1711-1714, 1719-1722, 1731-1738, 1747-1770, 1772, 1774, 1776, or 1779. In another embodiment, the sense region of ERG constructs comprises sequence having any of SEQ ID NOs. 1237-1412, 1597-1600, 1649-1652, 1657-1660, 1665-1668, 1673, 1675, 1677, 1679, 1680, 1695-1702, 1707-1710, 1715-1718, 1723-1730, 1739-1746, 1771, 1773, 1775, 1777, or 1778.

[0031] In one embodiment, a siNA molecule of the invention comprises any of SEQ ID NOs. 1-1779. The sequences shown in SEQ ID NOs: 1-1779 are not limiting. A siNA molecule of the invention can comprise any contiguous BCR-ABL and/or ERG sequence (e.g., about 15 to about 25 or more, or about 15, 16, 17, 18, 19, 20, 21, 22, 23, 24, or 25 or more contiguous BCR-ABL and/or ERG nucleotides).

[0032] In yet another embodiment, the invention features a siNA molecule comprising a sequence, for example, the antisense sequence of the siNA construct, complementary to a sequence or portion of sequence comprising sequence represented by GenBank Accession Nos. shown in Table I. Chemical modifications in Tables III and IV and described herein can be applied to any siNA construct of the invention.

[0033] In one embodiment of the invention a siNA molecule comprises an antisense strand having about 15 to about 30 (e.g., about 15, 16, 17, 18, 19, 20, 21, 22, 23, 24, 25, 26, 27, 28, 29, or 30) nucleotides, wherein the antisense strand is complementary to a RNA sequence or a portion thereof encoding a BCR-ABL and/or ERG protein, and wherein said siNA further comprises a sense strand having about 15 to about 30 (e.g., about 15, 16, 17, 18, 19, 20, 21, 22, 23, 24, 25, 26, 27, 28, 29, or 30) nucleotides, and wherein said sense strand and said antisense strand are distinct nucleotide sequences where at least about 15 nucleotides in each strand are complementary to the other strand.

[0034] In another embodiment of the invention a siNA molecule of the invention comprises an antisense region having about 15 to about 30 (e.g., about 15, 16, 17, 18, 19, 20, 21, 22, 23, 24, 25, 26, 27, 28, 29, or 30) nucleotides, wherein the antisense region is complementary to a RNA sequence encoding a BCR-ABL and/or ERG protein, and wherein said siNA further comprises a sense region having about 15 to about 30 (e.g., about 15, 16, 17, 18, 19, 20, 21, 22, 23, 24, 25, 26, 27, 28, 29, or 30) nucleotides, wherein said sense region and said antisense region are comprised in a linear molecule where the sense region comprises at least about 15 nucleotides that are complementary to the antisense region.

[0035] In one embodiment, a siNA molecule of the invention has RNAi activity that modulates expression of RNA encoded by a BCR-ABL and/or ERG gene. Because BCR-ABL and/or ERG genes can share some degree of sequence homology with each other, siNA molecules can be designed to target a class of BCR-ABL and/or ERG genes or alternately specific BCR-ABL and/or ERG genes (e.g., polymorphic variants) by selecting sequences that are either shared amongst different BCR-ABL and/or ERG targets or alternatively that are unique for a specific BCR-ABL and/or ERG target. Therefore, in one embodiment, the siNA molecule can be designed to target conserved regions of BCR-ABL and/or ERG RNA sequences having homology among several BCR-ABL and/or ERG gene variants so as to target a class of BCR-ABL and/or ERG genes with one siNA molecule. Accordingly, in one embodiment, the siNA molecule of the invention modulates the expression of one or both BCR-ABL and/or ERG alleles in a subject. In another embodiment, the siNA molecule can be designed to target a sequence that is unique to a specific BCR-ABL and/or ERG RNA sequence (e.g., a single BCR-ABL and/or ERG allele or BCR-ABL and/or ERG single nucleotide polymorphism (SNP)) due to the high degree of specificity that the siNA molecule requires to mediate RNAi activity.

[0036] In one embodiment, nucleic acid molecules of the invention that act as mediators of the RNA interference gene silencing response are double-stranded nucleic acid molecules. In another embodiment, the siNA molecules of the invention consist of duplex nucleic acid molecules containing about 15 to about 30 base pairs between oligonucleotides comprising about 15 to about 30 (e.g., about 15, 16, 17, 18, 19, 20, 21, 22, 23, 24, 25, 26, 27, 28, 29, or 30) nucleotides. In yet another embodiment, siNA molecules of the invention comprise duplex nucleic acid molecules with overhanging ends of about 1 to about 3 (e.g., about 1, 2, or 3) nucleotides, for example, about 21-nucleotide duplexes with about 19 base pairs and 3′-terminal mononucleotide, dinucleotide, or trinucleotide overhangs. In yet another embodiment, siNA molecules of the invention comprise duplex nucleic acid molecules with blunt ends, where both ends are blunt, or alternatively, where one of the ends is blunt.

[0037] In one embodiment, the invention features one or more chemically-modified siNA constructs having specificity for BCR-ABL and/or ERG expressing nucleic acid molecules, such as RNA encoding a BCR-ABL and/or ERG protein. In one embodiment, the invention features a RNA based siNA molecule (e.g., a siNA comprising 2′-OH nucleotides) having specificity for BCR-ABL and/or ERG expressing nucleic acid molecules that includes one or more chemical modifications described herein. Non-limiting examples of such chemical modifications include without limitation phosphorothioate internucleotide linkages, 2′-deoxyribonucleotides, 2′-O-methyl ribonucleotides, 2′-deoxy-2′-fluoro ribonucleotides, “universal base” nucleotides, “acyclic” nucleotides, 5-C-methyl nucleotides, and terminal glyceryl and/or inverted deoxy abasic residue incorporation. These chemical modifications, when used in various siNA constructs, (e.g., RNA based siNA constructs), are shown to preserve RNAi activity in cells while at the same time, dramatically increasing the serum stability of these compounds. Furthermore, contrary to the data published by Parrish et al., supra, applicant demonstrates that multiple (greater than one) phosphorothioate substitutions are well-tolerated and confer substantial increases in serum stability for modified siNA constructs.

[0038] In one embodiment, a siNA molecule of the invention comprises modified nucleotides while maintaining the ability to mediate RNAi. The modified nucleotides can be used to improve in vitro or in vivo characteristics such as stability, activity, and/or bioavailability. For example, a siNA molecule of the invention can comprise modified nucleotides as a percentage of the total number of nucleotides present in the siNA molecule. As such, a siNA molecule of the invention can generally comprise about 5% to about 100% modified nucleotides (e.g., about 5%, 10%, 15%, 20%, 25%, 30%, 35%, 40%, 45%, 50%, 55%, 60%, 65%, 70%, 75%, 80%, 85%, 90%, 95% or 100% modified nucleotides). The actual percentage of modified nucleotides present in a given siNA molecule will depend on the total number of nucleotides present in the siNA. If the siNA molecule is single stranded, the percent modification can be based upon the total number of nucleotides present in the single stranded siNA molecules. Likewise, if the siNA molecule is double stranded, the percent modification can be based upon the total number of nucleotides present in the sense strand, antisense strand, or both the sense and antisense strands.

[0039] One aspect of the invention features a double-stranded short interfering nucleic acid (siNA) molecule that down-regulates expression of a BCR-ABL and/or ERG gene. In one embodiment, the double stranded siNA molecule comprises one or more chemical modifications and each strand of the double-stranded siNA is about 21 nucleotides long. In one embodiment, the double-stranded siNA molecule does not contain any ribonucleotides. In another embodiment, the double-stranded siNA molecule comprises one or more ribonucleotides. In one embodiment, each strand of the double-stranded siNA molecule independently comprises about 15 to about 30 (e.g., about 15, 16, 17, 18, 19, 20, 21, 22, 23, 24, 25, 26, 27, 28, 29, or 30) nucleotides, wherein each strand comprises about 15 to about 30 (e.g., about 15, 16, 17, 18, 19, 20, 21, 22, 23, 24, 25, 26, 27, 28, 29, or 30) nucleotides that are complementary to the nucleotides of the other strand. In one embodiment, one of the strands of the double-stranded siNA molecule comprises a nucleotide sequence that is complementary to a nucleotide sequence or a portion thereof of the BCR-ABL and/or ERG gene, and the second strand of the double-stranded siNA molecule comprises a nucleotide sequence substantially similar to the nucleotide sequence of the BCR-ABL and/or ERG gene or a portion thereof.

[0040] In another embodiment, the invention features a double-stranded short interfering nucleic acid (siNA) molecule that down-regulates expression of a BCR-ABL and/or ERG gene comprising an antisense region, wherein the antisense region comprises a nucleotide sequence that is complementary to a nucleotide sequence of the BCR-ABL and/or ERG gene or a portion thereof, and a sense region, wherein the sense region comprises a nucleotide sequence substantially similar to the nucleotide sequence of the BCR-ABL and/or ERG gene or a portion thereof. In one embodiment, the antisense region and the sense region independently comprise about 15 to about 30 (e.g. about 15, 16, 17, 18, 19, 20, 21, 22, 23, 24, 25, 26, 27, 28, 29, or 30) nucleotides, wherein the antisense region comprises about 15 to about 30 (e.g. about 15, 16, 17, 18, 19, 20, 21, 22, 23, 24, 25, 26, 27, 28, 29, or 30) nucleotides that are complementary to nucleotides of the sense region.

[0041] In another embodiment, the invention features a double-stranded short interfering nucleic acid (siNA) molecule that down-regulates expression of a BCR-ABL and/or ERG gene comprising a sense region and an antisense region, wherein the antisense region comprises a nucleotide sequence that is complementary to a nucleotide sequence of RNA encoded by the BCR-ABL and/or ERG gene or a portion thereof and the sense region comprises a nucleotide sequence that is complementary to the antisense region.

[0042] In one embodiment, a siNA molecule of the invention comprises blunt ends, i.e., ends that do not include any overhanging nucleotides. For example, a siNA molecule comprising modifications described herein (e.g., comprising nucleotides having Formulae I-VII or siNA constructs comprising “Stab 00”-“Stab 32” (Table IV) or any combination thereof (see Table IV)) and/or any length described herein can comprise blunt ends or ends with no overhanging nucleotides.

[0043] In one embodiment, any siNA molecule of the invention can comprise one or more blunt ends, i.e. where a blunt end does not have any overhanging nucleotides. In one embodiment, the blunt ended siNA molecule has a number of base pairs equal to the number of nucleotides present in each strand of the siNA molecule. In another embodiment, the siNA molecule comprises one blunt end, for example wherein the 5′-end of the antisense strand and the 3′-end of the sense strand do not have any overhanging nucleotides. In another example, the siNA molecule comprises one blunt end, for example wherein the 3′-end of the antisense strand and the 5′-end of the sense strand do not have any overhanging nucleotides. In another example, a siNA molecule comprises two blunt ends, for example wherein the 3′-end of the antisense strand and the 5′-end of the sense strand as well as the 5′-end of the antisense strand and 3′-end of the sense strand do not have any overhanging nucleotides. A blunt ended siNA molecule can comprise, for example, from about 15 to about 30 nucleotides (e.g., about 15, 16, 17, 18, 19, 20, 21, 22, 23, 24, 25, 26, 27, 28, 29, or 30 nucleotides). Other nucleotides present in a blunt ended siNA molecule can comprise, for example, mismatches, bulges, loops, or wobble base pairs to modulate the activity of the siNA molecule to mediate RNA interference.

[0044] By “blunt ends” is meant symmetric termini or termini of a double stranded siNA molecule having no overhanging nucleotides. The two strands of a double stranded siNA molecule align with each other without over-hanging nucleotides at the termini. For example, a blunt ended siNA construct comprises terminal nucleotides that are complementary between the sense and antisense regions of the siNA molecule.

[0045] In one embodiment, the invention features a double-stranded short interfering nucleic acid (siNA) molecule that down-regulates expression of a BCR-ABL and/or ERG gene, wherein the siNA molecule is assembled from two separate oligonucleotide fragments wherein one fragment comprises the sense region and the second fragment comprises the antisense region of the siNA molecule. The sense region can be connected to the antisense region via a linker molecule, such as a polynucleotide linker or a non-nucleotide linker.

[0046] In one embodiment, the invention features double-stranded short interfering nucleic acid (siNA) molecule that down-regulates expression of a BCR-ABL and/or ERG gene, wherein the siNA molecule comprises about 15 to about 30 (e.g. about 15, 16, 17, 18, 19, 20, 21, 22, 23, 24, 25, 26, 27, 28, 29, or 30) base pairs, and wherein each strand of the siNA molecule comprises one or more chemical modifications. In another embodiment, one of the strands of the double-stranded siNA molecule comprises a nucleotide sequence that is complementary to a nucleotide sequence of a BCR-ABL and/or ERG gene or a portion thereof, and the second strand of the double-stranded siNA molecule comprises a nucleotide sequence substantially similar to the nucleotide sequence or a portion thereof of the BCR-ABL and/or ERG gene. In another embodiment, one of the strands of the double-stranded siNA molecule comprises a nucleotide sequence that is complementary to a nucleotide sequence of a BCR-ABL and/or ERG gene or portion thereof, and the second strand of the double-stranded siNA molecule comprises a nucleotide sequence substantially similar to the nucleotide sequence or portion thereof of the BCR-ABL and/or ERG gene. In another embodiment, each strand of the siNA molecule comprises about 15 to about 30 (e.g. about 15, 16, 17, 18, 19, 20, 21, 22, 23, 24, 25, 26, 27, 28, 29, or 30) nucleotides, and each strand comprises at least about 15 to about 30 (e.g. about 15, 16, 17, 18, 19, 20, 21, 22, 23, 24, 25, 26, 27, 28, 29, or 30) nucleotides that are complementary to the nucleotides of the other strand. The BCR-ABL and/or ERG gene can comprise, for example, sequences referred to in Table I.

[0047] In one embodiment, a siNA molecule of the invention comprises no ribonucleotides. In another embodiment, a siNA molecule of the invention comprises ribonucleotides.

[0048] In one embodiment, a siNA molecule of the invention comprises an antisense region comprising a nucleotide sequence that is complementary to a nucleotide sequence of a BCR-ABL and/or ERG gene or a portion thereof, and the siNA further comprises a sense region comprising a nucleotide sequence substantially similar to the nucleotide sequence of the BCR-ABL and/or ERG gene or a portion thereof. In another embodiment, the antisense region and the sense region each comprise about 15 to about 30 (e.g. about 15, 16, 17, 18, 19, 20, 21, 22, 23, 24, 25, 26, 27, 28, 29, or 30) nucleotides and the antisense region comprises at least about 15 to about 30 (e.g. about 15, 16, 17, 18, 19, 20, 21, 22, 23, 24, 25, 26, 27, 28, 29, or 30) nucleotides that are complementary to nucleotides of the sense region. The BCR-ABL and/or ERG gene can comprise, for example, sequences referred to in Table I. In another embodiment, the siNA is a double stranded nucleic acid molecule, where each of the two strands of the siNA molecule independently comprise about 15 to about 40 (e.g. about 15, 16, 17, 18, 19, 20, 21, 22, 23, 24, 25, 26, 27, 28, 29, 30, 31, 23, 33, 34, 35, 36, 37, 38, 39, or 40) nucleotides, and where one of the strands of the siNA molecule comprises at least about 15 (e.g. about 15, 16, 17, 18, 19, 20, 21, 22, 23, 24 or 25 or more) nucleotides that are complementary to the nucleic acid sequence of the BCR-ABL and/or ERG gene or a portion thereof.

[0049] In one embodiment, a siNA molecule of the invention comprises a sense region and an antisense region, wherein the antisense region comprises a nucleotide sequence that is complementary to a nucleotide sequence of RNA encoded by a BCR-ABL and/or ERG gene, or a portion thereof, and the sense region comprises a nucleotide sequence that is complementary to the antisense region. In one embodiment, the siNA molecule is assembled from two separate oligonucleotide fragments, wherein one fragment comprises the sense region and the second fragment comprises the antisense region of the siNA molecule. In another embodiment, the sense region is connected to the antisense region via a linker molecule. In another embodiment, the sense region is connected to the antisense region via a linker molecule, such as a nucleotide or non-nucleotide linker. The BCR-ABL and/or ERG gene can comprise, for example, sequences referred in to Table I.

[0050] In one embodiment, the invention features a double-stranded short interfering nucleic acid (siNA) molecule that down-regulates expression of a BCR-ABL and/or ERG gene comprising a sense region and an antisense region, wherein the antisense region comprises a nucleotide sequence that is complementary to a nucleotide sequence of RNA encoded by the BCR-ABL and/or ERG gene or a portion thereof and the sense region comprises a nucleotide sequence that is complementary to the antisense region, and wherein the siNA molecule has one or more modified pyrimidine and/or purine nucleotides. In one embodiment, the pyrimidine nucleotides in the sense region are 2′-O-methylpyrimidine nucleotides or 2′-deoxy-2′-fluoro pyrimidine nucleotides and the purine nucleotides present in the sense region are 2′-deoxy purine nucleotides. In another embodiment, the pyrimidine nucleotides in the sense region are 2′-deoxy-2′-fluoro pyrimidine nucleotides and the purine nucleotides present in the sense region are 2′-O-methyl purine nucleotides. In another embodiment, the pyrimidine nucleotides in the sense region are 2′-deoxy-2′-fluoro pyrimidine nucleotides and the purine nucleotides present in the sense region are 2′-deoxy purine nucleotides. In one embodiment, the pyrimidine nucleotides in the antisense region are 2′-deoxy-2′-fluoro pyrimidine nucleotides and the purine nucleotides present in the antisense region are 2′-O-methyl or 2′-deoxy purine nucleotides. In another embodiment of any of the above-described siNA molecules, any nucleotides present in a non-complementary region of the sense strand (e.g. overhang region) are 2′-deoxy nucleotides.

[0051] In one embodiment, the invention features a double-stranded short interfering nucleic acid (siNA) molecule that down-regulates expression of a BCR-ABL and/or ERG gene, wherein the siNA molecule is assembled from two separate oligonucleotide fragments wherein one fragment comprises the sense region and the second fragment comprises the antisense region of the siNA molecule, and wherein the fragment comprising the sense region includes a terminal cap moiety at the 5′-end, the 3′-end, or both of the 5′ and 3′ ends of the fragment. In one embodiment, the terminal cap moiety is an inverted deoxy abasic moiety or glyceryl moiety. In one embodiment, each of the two fragments of the siNA molecule independently comprise about 15 to about 30 (e.g. about 15, 16, 17, 18, 19, 20, 21, 22, 23, 24, 25, 26, 27, 28, 29, or 30) nucleotides. In another embodiment, each of the two fragments of the siNA molecule independently comprise about 15 to about 40 (e.g. about 15, 16, 17, 18, 19, 20, 21, 22, 23, 24, 25, 26, 27, 28, 29, 30, 31, 23, 33, 34, 35, 36, 37, 38, 39, or 40) nucleotides. In a non-limiting example, each of the two fragments of the siNA molecule comprise about 21 nucleotides.

[0052] In one embodiment, the invention features a siNA molecule comprising at least one modified nucleotide, wherein the modified nucleotide is a 2′-deoxy-2′-fluoro nucleotide. The siNA can be, for example, about 15 to about 40 nucleotides in length. In one embodiment, all pyrimidine nucleotides present in the siNA are 2′-deoxy-2′-fluoro pyrimidine nucleotides. In one embodiment, the modified nucleotides in the siNA include at least one 2′-deoxy-2′-fluoro cytidine or 2′-deoxy-2′-fluoro uridine nucleotide. In another embodiment, the modified nucleotides in the siNA include at least one 2′-fluoro cytidine and at least one 2′-deoxy-2′-fluoro uridine nucleotides. In one embodiment, all uridine nucleotides present in the siNA are 2′-deoxy-2′-fluoro uridine nucleotides. In one embodiment, all cytidine nucleotides present in the siNA are 2′-deoxy-2′-fluoro cytidine nucleotides. In one embodiment, all adenosine nucleotides present in the siNA are 2′-deoxy-2′-fluoro adenosine nucleotides. In one embodiment, all guanosine nucleotides present in the siNA are 2′-deoxy-2′-fluoro guanosine nucleotides. The siNA can further comprise at least one modified internucleotidic linkage, such as phosphorothioate linkage. In one embodiment, the 2′-deoxy-2′-fluoronucleotides are present at specifically selected locations in the siNA that are sensitive to cleavage by ribonucleases, such as locations having pyrimidine nucleotides.

[0053] In one embodiment, the invention features a method of increasing the stability of a siNA molecule against cleavage by ribonucleases comprising introducing at least one modified nucleotide into the siNA molecule, wherein the modified nucleotide is a 2′-deoxy-2′-fluoro nucleotide. In one embodiment, all pyrimidine nucleotides present in the siNA are 2′-deoxy-2′-fluoro pyrimidine nucleotides. In one embodiment, the modified nucleotides in the siNA include at least one 2′-deoxy-2′-fluoro cytidine or 2′-deoxy-2′-fluoro uridine nucleotide. In another embodiment, the modified nucleotides in the siNA include at least one 2′-fluoro cytidine and at least one 2′-deoxy-2′-fluoro uridine nucleotides. In one embodiment, all uridine nucleotides present in the siNA are 2′-deoxy-2′-fluoro uridine nucleotides. In one embodiment, all cytidine nucleotides present in the siNA are 2′-deoxy-2′-fluoro cytidine nucleotides. In one embodiment, all adenosine nucleotides present in the siNA are 2′-deoxy-2′-fluoro adenosine nucleotides. In one embodiment, all guanosine nucleotides present in the siNA are 2′-deoxy-2′-fluoro guanosine nucleotides. The siNA can further comprise at least one modified internucleotidic linkage, such as phosphorothioate linkage. In one embodiment, the 2′-deoxy-2′-fluoronucleotides are present at specifically selected locations in the siNA that are sensitive to cleavage by ribonucleases, such as locations having pyrimidine nucleotides.

[0054] In one embodiment, the invention features a double-stranded short interfering nucleic acid (siNA) molecule that down-regulates expression of a BCR-ABL and/or ERG gene comprising a sense region and an antisense region, wherein the antisense region comprises a nucleotide sequence that is complementary to a nucleotide sequence of RNA encoded by the BCR-ABL and/or ERG gene or a portion thereof and the sense region comprises a nucleotide sequence that is complementary to the antisense region, and wherein the purine nucleotides present in the antisense region comprise 2′-deoxy-purine nucleotides. In an alternative embodiment, the purine nucleotides present in the antisense region comprise 2′-O-methyl purine nucleotides. In either of the above embodiments, the antisense region can comprise a phosphorothioate internucleotide linkage at the 3′ end of the antisense region. Alternatively, in either of the above embodiments, the antisense region can comprise a glyceryl modification at the 3′ end of the antisense region. In another embodiment of any of the above-described siNA molecules, any nucleotides present in a non-complementary region of the antisense strand (e.g. overhang region) are 2′-deoxy nucleotides.

[0055] In one embodiment, the antisense region of a siNA molecule of the invention comprises sequence complementary to a portion of a BCR-ABL and/or ERG transcript having sequence unique to a particular BCR-ABL and/or ERG disease related allele, such as sequence comprising a single nucleotide polymorphism (SNP) associated with the disease specific allele. As such, the antisense region of a siNA molecule of the invention can comprise sequence complementary to sequences that are unique to a particular allele to provide specificity in mediating selective RNAi against the disease, condition, or trait related allele.

[0056] In one embodiment, the invention features a double-stranded short interfering nucleic acid (siNA) molecule that down-regulates expression of a BCR-ABL and/or ERG gene, wherein the siNA molecule is assembled from two separate oligonucleotide fragments wherein one fragment comprises the sense region and the second fragment comprises the antisense region of the siNA molecule. In another embodiment, the siNA molecule is a double stranded nucleic acid molecule, where each strand is about 21 nucleotides long and where about 19 nucleotides of each fragment of the siNA molecule are base-paired to the complementary nucleotides of the other fragment of the siNA molecule, wherein at least two 3′ terminal nucleotides of each fragment of the siNA molecule are not base-paired to the nucleotides of the other fragment of the siNA molecule. In another embodiment, the siNA molecule is a double stranded nucleic acid molecule, where each strand is about 19 nucleotide long and where the nucleotides of each fragment of the siNA molecule are base-paired to the complementary nucleotides of the other fragment of the siNA molecule to form at least about 15 (e.g., 15, 16, 17, 18, or
[0057] 19) base pairs, wherein one or both ends of the siNA molecule are blunt ends. In one embodiment, each of the two 3′ terminal nucleotides of each fragment of the siNA molecule is a 2′-deoxy-pyrimidine nucleotide, such as a 2′-deoxy-thymidine. In another embodiment, all nucleotides of each fragment of the siNA molecule are base-paired to the complementary nucleotides of the other fragment of the siNA molecule. In another embodiment, the siNA molecule is a double stranded nucleic acid molecule of about 19 to about 25 base pairs having a sense region and an antisense region, where about 19 nucleotides of the antisense region are base-paired to the nucleotide sequence or a portion thereof of the RNA encoded by the BCR-ABL and/or ERG gene. In another embodiment, about 21 nucleotides of the antisense region are base-paired to the nucleotide sequence or a portion thereof of the RNA encoded by the BCR-ABL and/or ERG gene. In any of the above embodiments, the 5′-end of the fragment comprising said antisense region can optionally include a phosphate group.

[0058] In one embodiment, the invention features a double-stranded short interfering nucleic acid (siNA) molecule that inhibits the expression of a BCR-ABL and/or ERG RNA sequence (e.g., wherein said target RNA sequence is encoded by a BCR-ABL and/or ERG gene involved in the BCR-ABL and/or ERG pathway), wherein the siNA molecule does not contain any ribonucleotides and wherein each strand of the double-stranded siNA molecule is about 15 to about 30 nucleotides. In one embodiment, the siNA molecule is 21 nucleotides in length. Examples of non-ribonucleotide containing siNA constructs are combinations of stabilization chemistries shown in Table IV in any combination of Sense/Antisense chemistries, such as Stab 7/8, Stab 7/11, Stab 8/8, Stab 18/8, Stab 18/11, Stab 12/13, Stab 7/13, Stab 18/13, Stab 7/19, Stab 8/19, Stab 18/19, Stab 7/20, Stab 8/20, Stab 18/20, Stab 7/32, Stab 8/32, or Stab 18/32 (e.g., any siNA having Stab 7, 8, 11, 12, 13, 14, 15, 17, 18, 19, 20, or 32 sense or antisense strands or any combination thereof).

[0059] In one embodiment, the invention features a chemically synthesized double stranded RNA molecule that directs cleavage of a BCR-ABL and/or ERG RNA via RNA interference, wherein each strand of said RNA molecule is about 15 to about 30 nucleotides in length; one strand of the RNA molecule comprises nucleotide sequence having sufficient complementarity to the BCR-ABL and/or ERG RNA for the RNA molecule to direct cleavage of the BCR-ABL and/or ERG RNA via RNA interference; and wherein at least one strand of the RNA molecule optionally comprises one or more chemically modified nucleotides described herein, such as without limitation deoxynucleotides, 2′-O-methyl nucleotides, 2′-deoxy-2′-fluoro nucloetides, 2′-O-methoxyethyl nucleotides etc.

[0060] In one embodiment, the invention features a medicament comprising a siNA molecule of the invention.

[0061] In one embodiment, the invention features an active ingredient comprising a siNA molecule of the invention.

[0062] In one embodiment, the invention features the use of a double-stranded short interfering nucleic acid (siNA) molecule to inhibit, down-regulate, or reduce expression of a BCR-ABL and/or ERG gene, wherein the siNA molecule comprises one or more chemical modifications and each strand of the double-stranded siNA is independently about 15 to about 30 or more (e.g., about 15, 16, 17, 18, 19, 20, 21, 22, 23, 24, 25, 26, 27, 28, 29 or 30 or more) nucleotides long. In one embodiment, the siNA molecule of the invention is a double stranded nucleic acid molecule comprising one or more chemical modifications, where each of the two fragments of the siNA molecule independently comprise about 15 to about 40 (e.g. about 15, 16, 17, 18, 19, 20, 21, 22, 23, 24, 25, 26, 27, 28, 29, 30, 31, 23, 33, 34, 35, 36, 37, 38, 39, or 40) nucleotides and where one of the strands comprises at least 15 nucleotides that are complementary to nucleotide sequence of BCR-ABL and/or ERG encoding RNA or a portion thereof. In a non-limiting example, each of the two fragments of the siNA molecule comprise about 21 nucleotides. In another embodiment, the siNA molecule is a double stranded nucleic acid molecule comprising one or more chemical modifications, where each strand is about 21 nucleotide long and where about 19 nucleotides of each fragment of the siNA molecule are base-paired to the complementary nucleotides of the other fragment of the siNA molecule, wherein at least two 3′ terminal nucleotides of each fragment of the siNA molecule are not base-paired to the nucleotides of the other fragment of the siNA molecule. In another embodiment, the siNA molecule is a double stranded nucleic acid molecule comprising one or more chemical modifications, where each strand is about 19 nucleotide long and where the nucleotides of each fragment of the siNA molecule are base-paired to the complementary nucleotides of the other fragment of the siNA molecule to form at least about 15 (e.g., 15, 16, 17, 18, or 19) base pairs, wherein one or both ends of the siNA molecule are blunt ends. In one embodiment, each of the two 3′ terminal nucleotides of each fragment of the siNA molecule is a 2′-deoxy-pyrimidine nucleotide, such as a 2′-deoxy-thymidine. In another embodiment, all nucleotides of each fragment of the siNA molecule are base-paired to the complementary nucleotides of the other fragment of the siNA molecule. In another embodiment, the siNA molecule is a double stranded nucleic acid molecule of about 19 to about 25 base pairs having a sense region and an antisense region and comprising one or more chemical modifications, where about 19 nucleotides of the antisense region are base-paired to the nucleotide sequence or a portion thereof of the RNA encoded by the BCR-ABL and/or ERG gene. In another embodiment, about 21 nucleotides of the antisense region are base-paired to the nucleotide sequence or a portion thereof of the RNA encoded by the BCR-ABL and/or ERG gene. In any of the above embodiments, the 5′-end of the fragment comprising said antisense region can optionally include a phosphate group.

[0063] In one embodiment, the invention features the use of a double-stranded short interfering nucleic acid (siNA) molecule that inhibits, down-regulates, or reduces expression of a BCR-ABL and/or ERG gene, wherein one of the strands of the double-stranded siNA molecule is an antisense strand which comprises nucleotide sequence that is complementary to nucleotide sequence of BCR-ABL and/or ERG RNA or a portion thereof, the other strand is a sense strand which comprises nucleotide sequence that is complementary to a nucleotide sequence of the antisense strand and wherein a majority of the pyrimidine nucleotides present in the double-stranded siNA molecule comprises a sugar modification.

[0064] In one embodiment, the invention features a double-stranded short interfering nucleic acid (siNA) molecule that inhibits, down-regulates, or reduces expression of a BCR-ABL and/or ERG gene, wherein one of the strands of the double-stranded siNA molecule is an antisense strand which comprises nucleotide sequence that is complementary to nucleotide sequence of BCR-ABL and/or ERG RNA or a portion thereof, wherein the other strand is a sense strand which comprises nucleotide sequence that is complementary to a nucleotide sequence of the antisense strand and wherein a majority of the pyrimidine nucleotides present in the double-stranded siNA molecule comprises a sugar modification.

[0065] In one embodiment, the invention features a double-stranded short interfering nucleic acid (siNA) molecule that inhibits, down-regulates, or reduces expression of a BCR-ABL and/or ERG gene, wherein one of the strands of the double-stranded siNA molecule is an antisense strand which comprises nucleotide sequence that is complementary to nucleotide sequence of BCR-ABL and/or ERG RNA that encodes a protein or portion thereof, the other strand is a sense strand which comprises nucleotide sequence that is complementary to a nucleotide sequence of the antisense strand and wherein a majority of the pyrimidine nucleotides present in the double-stranded siNA molecule comprises a sugar modification. In one embodiment, each strand of the siNA molecule comprises about 15 to about 30 or more (e.g., about 15, 16, 17, 18, 19, 20, 21, 22, 23, 24, 25, 26, 27, 28, 29, or 30 or more) nucleotides, wherein each strand comprises at least about 15 nucleotides that are complementary to the nucleotides of the other strand. In one embodiment, the siNA molecule is assembled from two oligonucleotide fragments, wherein one fragment comprises the nucleotide sequence of the antisense strand of the siNA molecule and a second fragment comprises nucleotide sequence of the sense region of the siNA molecule. In one embodiment, the sense strand is connected to the antisense strand via a linker molecule, such as a polynucleotide linker or a non-nucleotide linker. In a further embodiment, the pyrimidine nucleotides present in the sense strand are 2′-deoxy-2′-fluoro pyrimidine nucleotides and the purine nucleotides present in the sense region are 2′-deoxy purine nucleotides. In another embodiment, the pyrimidine nucleotides present in the sense strand are 2′-deoxy-2′fluoro pyrimidine nucleotides and the purine nucleotides present in the sense region are 2′-O-methyl purine nucleotides. In still another embodiment, the pyrimidine nucleotides present in the anti sense strand are 2′-deoxy-2′-fluoro pyrimidine nucleotides and any purine nucleotides present in the antisense strand are 2′-deoxy purine nucleotides. In another embodiment, the antisense strand comprises one or more 2′-deoxy-2′-fluoro pyrimidine nucleotides and one or more 2′-O-methyl purine nucleotides. In another embodiment, the pyrimidine nucleotides present in the antisense strand are 2′-deoxy-2′-fluoro pyrimidine nucleotides and any purine nucleotides present in the antisense strand are 2′-O-methyl purine nucleotides. In a further embodiment the sense strand comprises a 3′-end and a 5′-end, wherein a terminal cap moiety (e.g., an inverted deoxy abasic moiety or inverted deoxy nucleotide moiety such as inverted thymidine) is present at the 5′-end, the 3′-end, or both of the 5′ and 3′ ends of the sense strand. In another embodiment, the antisense strand comprises a phosphorothioate internucleotide linkage at the 3′ end of the antisense strand. In another embodiment, the antisense strand comprises a glyceryl modification at the 3′ end. In another embodiment, the 5′-end of the antisense strand optionally includes a phosphate group.

[0066] In any of the above-described embodiments of a double-stranded short interfering nucleic acid (siNA) molecule that inhibits expression of a BCR-ABL and/or ERG gene, wherein a majority of the pyrimidine nucleotides present in the double-stranded siNA molecule comprises a sugar modification, each of the two strands of the siNA molecule can comprise about 15 to about 30 or more (e.g., about 15, 16, 17, 18, 19, 20, 21, 22, 23, 24, 25, 26, 27, 28, 29, or 30 or more) nucleotides. In one embodiment, about 15 to about 30 or more (e.g., about 15, 16, 17, 18, 19, 20, 21, 22, 23, 24, 25, 26, 27, 28, 29, or 30 or more) nucleotides of each strand of the siNA molecule are base-paired to the complementary nucleotides of the other strand of the siNA molecule. In another embodiment, about 15 to about 30 or more (e.g., about 15, 16, 17, 18, 19, 20, 21, 22, 23, 24, 25, 26, 27, 28, 29, or 30 or more) nucleotides of each strand of the siNA molecule are base-paired to the complementary nucleotides of the other strand of the siNA molecule, wherein at least two 3′ terminal nucleotides of each strand of the siNA molecule are not base-paired to the nucleotides of the other strand of the siNA molecule. In another embodiment, each of the two 3′ terminal nucleotides of each fragment of the siNA molecule is a 2′-deoxy-pyrimidine, such as 2′-deoxy-thymidine. In one embodiment, each strand of the siNA molecule is base-paired to the complementary nucleotides of the other strand of the siNA molecule. In one embodiment, about 15 to about 30 (e.g., about 15, 16, 17, 18, 19, 20, 21, 22, 23, 24, 25, 26, 27, 28, 29, or 30) nucleotides of the antisense strand are base-paired to the nucleotide sequence of the BCR-ABL and/or ERG RNA or a portion thereof. In one embodiment, about 18 to about 25 (e.g., about 18, 19, 20, 21, 22, 23, 24, or 25) nucleotides of the antisense strand are base-paired to the nucleotide sequence of the BCR-ABL and/or ERG RNA or a portion thereof.

[0067] In one embodiment, the invention features a double-stranded short interfering nucleic acid (siNA) molecule that inhibits expression of a BCR-ABL and/or ERG gene, wherein one of the strands of the double-stranded siNA molecule is an antisense strand which comprises nucleotide sequence that is complementary to nucleotide sequence of BCR-ABL and/or ERG RNA or a portion thereof, the other strand is a sense strand which comprises nucleotide sequence that is complementary to a nucleotide sequence of the antisense strand and wherein a majority of the pyrimidine nucleotides present in the double-stranded siNA molecule comprises a sugar modification, and wherein the 5′-end of the antisense strand optionally includes a phosphate group.

[0068] In one embodiment, the invention features a double-stranded short interfering nucleic acid (siNA) molecule that inhibits expression of a BCR-ABL and/or ERG gene, wherein one of the strands of the double-stranded siNA molecule is an antisense strand which comprises nucleotide sequence that is complementary to nucleotide sequence of BCR-ABL and/or ERG RNA or a portion thereof, the other strand is a sense strand which comprises nucleotide sequence that is complementary to a nucleotide sequence of the antisense strand and wherein a majority of the pyrimidine nucleotides present in the double-stranded siNA molecule comprises a sugar modification, and wherein the nucleotide sequence or a portion thereof of the antisense strand is complementary to a nucleotide sequence of the untranslated region or a portion thereof of the BCR-ABL and/or ERG RNA.

[0069] In one embodiment, the invention features a double-stranded short interfering nucleic acid (siNA) molecule that inhibits expression of a BCR-ABL and/or ERG gene, wherein one of the strands of the double-stranded siNA molecule is an antisense strand which comprises nucleotide sequence that is complementary to nucleotide sequence of BCR-ABL and/or ERG RNA or a portion thereof, wherein the other strand is a sense strand which comprises nucleotide sequence that is complementary to a nucleotide sequence of the antisense strand, wherein a majority of the pyrimidine nucleotides present in the double-stranded siNA molecule comprises a sugar modification, and wherein the nucleotide sequence of the antisense strand is complementary to a nucleotide sequence of the BCR-ABL and/or ERG or a portion thereof that is present in the BCR-ABL and/or ERG RNA.

[0070] In one embodiment, the invention features a composition comprising a siNA molecule of the invention in a pharmaceutically acceptable carrier or diluent.

[0071] In a non-limiting example, the introduction of chemically-modified nucleotides into nucleic acid molecules provides a powerful tool in overcoming potential limitations of in vivo stability and bioavailability inherent to native RNA molecules that are delivered exogenously. For example, the use of chemically-modified nucleic acid molecules can enable a lower dose of a particular nucleic acid molecule for a given therapeutic effect since chemically-modified nucleic acid molecules tend to have a longer half-life in serum. Furthermore, certain chemical modifications can improve the bioavailability of nucleic acid molecules by targeting particular cells or tissues and/or improving cellular uptake of the nucleic acid molecule. Therefore, even if the activity of a chemically-modified nucleic acid molecule is reduced as compared to a native nucleic acid molecule, for example, when compared to an all-RNA nucleic acid molecule, the overall activity of the modified nucleic acid molecule can be greater than that of the native molecule due to improved stability and/or delivery of the molecule. Unlike native unmodified siNA, chemically-modified siNA can also minimize the possibility of activating interferon activity in humans.

[0072] In any of the embodiments of siNA molecules described herein, the antisense region of a siNA molecule of the invention can comprise a phosphorothioate internucleotide linkage at the 3′-end of said antisense region. In any of the embodiments of siNA molecules described herein, the antisense region can comprise about one to about five phosphorothioate internucleotide linkages at the 5′-end of said antisense region. In any of the embodiments of siNA molecules described herein, the 3′-terminal nucleotide overhangs of a siNA molecule of the invention can comprise ribonucleotides or deoxyribonucleotides that are chemically-modified at a nucleic acid sugar, base, or backbone. In any of the embodiments of siNA molecules described herein, the 3′-terminal nucleotide overhangs can comprise one or more universal base ribonucleotides. In any of the embodiments of siNA molecules described herein, the 3′-terminal nucleotide overhangs can comprise one or more acyclic nucleotides.

[0073] One embodiment of the invention provides an expression vector comprising a nucleic acid sequence encoding at least one siNA molecule of the invention in a manner that allows expression of the nucleic acid molecule. Another embodiment of the invention provides a mammalian cell comprising such an expression vector. The mammalian cell can be a human cell. The siNA molecule of the expression vector can comprise a sense region and an antisense region. The antisense region can comprise sequence complementary to a RNA or DNA sequence encoding BCR-ABL and/or ERG and the sense region can comprise sequence complementary to the antisense region. The siNA molecule can comprise two distinct strands having complementary sense and antisense regions. The siNA molecule can comprise a single strand having complementary sense and antisense regions.

[0074] In one embodiment, the invention features a chemically-modified short interfering nucleic acid (siNA) molecule capable of mediating RNA interference (RNAi) against BCR-ABL and/or ERG inside a cell or reconstituted in vitro system, wherein the chemical modification comprises one or more (e.g., about 1, 2, 3, 4, 5, 6, 7, 8, 9, 10, or more) nucleotides comprising a backbone modified internucleotide linkage having Formula I: [chemical structure]
[0075] wherein each R1 and R2 is independently any nucleotide, non-nucleotide, or polynucleotide which can be naturally-occurring or chemically-modified, each X and Y is independently O, S, N, alkyl, or substituted alkyl, each Z and W is independently O, S, N, alkyl, substituted alkyl, O-alkyl, S-alkyl, alkaryl, aralkyl, or acetyl and wherein W, X, Y, and Z are optionally not all 0. In another embodiment, a backbone modification of the invention comprises a phosphonoacetate and/or thiophosphonoacetate internucleotide linkage (see for example Sheehan et al., 2003, Nucleic Acids Research, 31, 4109-4118).

[0076] The chemically-modified internucleotide linkages having Formula I, for example, wherein any Z, W, X, and/or Y independently comprises a sulphur atom, can be present in one or both oligonucleotide strands of the siNA duplex, for example, in the sense strand, the antisense strand, or both strands. The siNA molecules of the invention can comprise one or more (e.g., about 1, 2, 3, 4, 5, 6, 7, 8, 9, 10, or more) chemically-modified internucleotide linkages having Formula I at the 3′-end, the 5′-end, or both of the ₃′ and 5′-ends of the sense strand, the antisense strand, or both strands. For example, an exemplary siNA molecule of the invention can comprise about 1 to about 5 or more (e.g., about 1, 2, 3, 4, 5, or more) chemically-modified internucleotide linkages having Formula I at the 5′-end of the sense strand, the antisense strand, or both strands. In another non-limiting example, an exemplary siNA molecule of the invention can comprise one or more (e.g., about 1, 2, 3, 4, 5, 6, 7, 8, 9, 10, or more) pyrimidine nucleotides with chemically-modified internucleotide linkages having Formula I in the sense strand, the antisense strand, or both strands. In yet another non-limiting example, an exemplary siNA molecule of the invention can comprise one or more (e.g., about 1, 2, 3, 4, 5, 6, 7, 8, 9, 10, or more) purine nucleotides with chemically-modified internucleotide linkages having Formula I in the sense strand, the antisense strand, or both strands. In another embodiment, a siNA molecule of the invention having internucleotide linkage(s) of Formula I also comprises a chemically-modified nucleotide or non-nucleotide having any of Formulae I-VII.

[0077] In one embodiment, the invention features a chemically-modified short interfering nucleic acid (siNA) molecule capable of mediating RNA interference (RNAi) against BCR-ABL and/or ERG inside a cell or reconstituted in vitro system, wherein the chemical modification comprises one or more (e.g., about 1, 2, 3, 4, 5, 6, 7, 8, 9, 10, or more) nucleotides or non-nucleotides having Formula II: [chemical structure]
wherein each R3, R4, R5, R6, R7, R8, R10, R 11 and R12 is independently H, OH, alkyl, substituted alkyl, alkaryl or aralkyl, F, Cl, Br, CN, CF3, OCF3, OCN, O-alkyl, S-alkyl, N-alkyl, O-alkenyl, S-alkenyl, N-alkenyl, SO-alkyl, alkyl-OSH, alkyl-OH, O-alkyl-OH, O-alkyl-SH, S-alkyl-OH, S-alkyl-SH, alkyl-S-alkyl, alkyl-O-alkyl, ONO₂, NO₂, N3, NH2, aminoalkyl, aminoacid, aminoacyl, ONH2, O-aminoalkyl, O-aminoacid, O-aminoacyl, heterocycloalkyl, heterocycloalkaryl, aminoalkylamino, polyalklylamino, substituted silyl, or group having Formula I or II; R9 is O, S, CH2, S═O, CHF, or CF2, and B is a nucleosidic base such as adenine, guanine, uracil, cytosine, thymine, 2-aminoadenosine, 5-methylcytosine, 2,6-diaminopurine, or any other non-naturally occurring base that can be complementary or non-complementary to target RNA or a non-nucleosidic base such as phenyl, naphthyl, 3-nitropyrrole, 5-nitroindole, nebularine, pyridone, pyridinone, or any other non-naturally occurring universal base that can be complementary or non-complementary to target RNA.

[0078] The chemically-modified nucleotide or non-nucleotide of Formula II can be present in one or both oligonucleotide strands of the siNA duplex, for example in the sense strand, the antisense strand, or both strands. The siNA molecules of the invention can comprise one or more chemically-modified nucleotide or non-nucleotide of Formula II at the 3′-end, the 5′-end, or both of the 3′ and 5′-ends of the sense strand, the antisense strand, or both strands. For example, an exemplary siNA molecule of the invention can comprise about 1 to about 5 or more (e.g., about 1, 2, 3, 4, 5, or more) chemically-modified nucleotides or non-nucleotides of Formula II at the 5′-end of the sense strand, the antisense strand, or both strands. In anther non-limiting example, an exemplary siNA molecule of the invention can comprise about 1 to about 5 or more (e.g., about 1, 2, 3, 4, 5, or more) chemically-modified nucleotides or non-nucleotides of Formula II at the 3′-end of the sense strand, the antisense strand, or both strands.

[0079] In one embodiment, the invention features a chemically-modified short interfering nucleic acid (siNA) molecule capable of mediating RNA interference (RNAi) against BCR-ABL and/or ERG inside a cell or reconstituted in vitro system, wherein the chemical modification comprises one or more (e.g., about 1, 2, 3, 4, 5, 6, 7, 8, 9, 10, or more) nucleotides or non-nucleotides having Formula III: [chemical structure]
wherein each R3, R4, R5, R6, R7, R8, R10, R 11 and R12 is independently H, OH, alkyl, substituted alkyl, alkaryl or aralkyl, F, Cl, Br, CN, CF3, OCF3, OCN, O-alkyl, S-alkyl, N-alkyl, O-alkenyl, S-alkenyl, N-alkenyl, SO-alkyl, alkyl-OSH, alkyl-OH, O-alkyl-OH, O-alkyl-SH, S-alkyl-OH, S-alkyl-SH, alkyl-S-alkyl, alkyl-O-alkyl, ONO₂, NO₂, N3, NH2, aminoalkyl, aminoacid, aminoacyl, ONH2, O-aminoalkyl, O-aminoacid, O-aminoacyl, heterocycloalkyl, heterocycloalkaryl, aminoalkylamino, polyalklylamino, substituted silyl, or group having Formula I or II; R9 is O, S, CH2, S═O, CHF, or CF2, and B is a nucleosidic base such as adenine, guanine, uracil, cytosine, thymine, 2-aminoadenosine, 5-methylcytosine, 2,6-diaminopurine, or any other non-naturally occurring base that can be employed to be complementary or non-complementary to target RNA or a non-nucleosidic base such as phenyl, naphthyl, 3-nitropyrrole, 5-nitroindole, nebularine, pyridone, pyridinone, or any other non-naturally occurring universal base that can be complementary or non-complementary to target RNA.

[0080] The chemically-modified nucleotide or non-nucleotide of Formula III can be present in one or both oligonucleotide strands of the siNA duplex, for example, in the sense strand, the antisense strand, or both strands. The siNA molecules of the invention can comprise one or more chemically-modified nucleotide or non-nucleotide of Formula III at the 3′-end, the 5′-end, or both of the 3′ and 5′-ends of the sense strand, the antisense strand, or both strands. For example, an exemplary siNA molecule of the invention can comprise about 1 to about 5 or more (e.g., about 1, 2, 3, 4, 5, or more) chemically-modified nucleotide(s) or non-nucleotide(s) of Formula III at the 5′-end of the sense strand, the antisense strand, or both strands. In anther non-limiting example, an exemplary siNA molecule of the invention can comprise about 1 to about 5 or more (e.g., about 1, 2, 3, 4, 5, or more) chemically-modified nucleotide or non-nucleotide of Formula III at the 3′-end of the sense strand, the antisense strand, or both strands.

[0081] In another embodiment, a siNA molecule of the invention comprises a nucleotide having Formula II or III, wherein the nucleotide having Formula II or III is in an inverted configuration. For example, the nucleotide having Formula II or III is connected to the siNA construct in a 3′-3′,3′-2′,2′-3′, or 5′-5′ configuration, such as at the 3′-end, the 5′-end, or both of the 3′ and 5′-ends of one or both siNA strands.

[0082] In one embodiment, the invention features a chemically-modified short interfering nucleic acid (siNA) molecule capable of mediating RNA interference (RNAi) against BCR-ABL and/or ERG inside a cell or reconstituted in vitro system, wherein the chemical modification comprises a 5′-terminal phosphate group having Formula IV: [chemical structure]
wherein each X and Y is independently O, S, N, alkyl, substituted alkyl, or alkylhalo; wherein each Z and W is independently O, S, N, alkyl, substituted alkyl, O-alkyl, S-alkyl, alkaryl, aralkyl, alkylhalo, or acetyl; and wherein W, X, Y and Z are not all 0.

[0083] In one embodiment, the invention features a siNA molecule having a 5′-terminal phosphate group having Formula IV on the target-complementary strand, for example, a strand complementary to a target RNA, wherein the siNA molecule comprises an all RNA siNA molecule. In another embodiment, the invention features a siNA molecule having a 5′-terminal phosphate group having Formula IV on the target-complementary strand wherein the siNA molecule also comprises about 1 to about 3 (e.g., about 1, 2, or
[0084] 3) nucleotide 3′-terminal nucleotide overhangs having about 1 to about 4 (e.g., about 1, 2, 3, or 4) deoxyribonucleotides on the 3′-end of one or both strands. In another embodiment, a 5′-terminal phosphate group having Formula IV is present on the target-complementary strand of a siNA molecule of the invention, for example a siNA molecule having chemical modifications having any of Formulae I-VII.

[0085] In one embodiment, the invention features a chemically-modified short interfering nucleic acid (siNA) molecule capable of mediating RNA interference (RNAi) against BCR-ABL and/or ERG inside a cell or reconstituted in vitro system, wherein the chemical modification comprises one or more phosphorothioate internucleotide linkages. For example, in a non-limiting example, the invention features a chemically-modified short interfering nucleic acid (siNA) having about 1, 2, 3, 4, 5, 6, 7, 8 or more phosphorothioate internucleotide linkages in one siNA strand. In yet another embodiment, the invention features a chemically-modified short interfering nucleic acid (siNA) individually having about 1, 2, 3, 4, 5, 6, 7, 8 or more phosphorothioate internucleotide linkages in both siNA strands. The phosphorothioate internucleotide linkages can be present in one or both oligonucleotide strands of the siNA duplex, for example in the sense strand, the antisense strand, or both strands. The siNA molecules of the invention can comprise one or more phosphorothioate internucleotide linkages at the 3′-end, the 5′-end, or both of the 3′- and 5′-ends of the sense strand, the antisense strand, or both strands. For example, an exemplary siNA molecule of the invention can comprise about 1 to about 5 or more (e.g., about 1, 2, 3, 4, 5, or more) consecutive phosphorothioate internucleotide linkages at the 5′-end of the sense strand, the antisense strand, or both strands. In another non-limiting example, an exemplary siNA molecule of the invention can comprise one or more (e.g., about 1, 2, 3, 4, 5, 6, 7, 8, 9, 10, or more) pyrimidine phosphorothioate internucleotide linkages in the sense strand, the antisense strand, or both strands. In yet another non-limiting example, an exemplary siNA molecule of the invention can comprise one or more (e.g., about 1, 2, 3, 4, 5, 6, 7, 8, 9, 10, or more) purine phosphorothioate internucleotide linkages in the sense strand, the antisense strand, or both strands.

[0086] In one embodiment, the invention features a siNA molecule, wherein the sense strand comprises one or more, for example, about 1, 2, 3, 4, 5, 6, 7, 8, 9, 10, or more phosphorothioate internucleotide linkages, and/or one or more (e.g., about 1, 2, 3, 4, 5, 6, 7, 8, 9, 10 or more) 2′-deoxy, 2′-O-methyl, 2′-deoxy-2′-fluoro, and/or about one or more (e.g., about 1, 2, 3, 4, 5, 6, 7, 8, 9, 10 or more) universal base modified nucleotides, and optionally a terminal cap molecule at the 3′-end, the 5′-end, or both of the 3′- and 5′-ends of the sense strand; and wherein the antisense strand comprises about 1 to about 10 or more, specifically about 1, 2, 3, 4, 5, 6, 7, 8, 9, 10, or more phosphorothioate internucleotide linkages, and/or one or more (e.g., about 1, 2, 3, 4, 5, 6, 7, 8, 9, 10 or more) 2′-deoxy, 2′-O-methyl, 2′-deoxy-2′-fluoro, and/or one or more (e.g., about 1, 2, 3, 4, 5, 6, 7, 8, 9, 10 or more) universal base modified nucleotides, and optionally a terminal cap molecule at the 3′-end, the 5′-end, or both of the 3′- and 5′-ends of the antisense strand. In another embodiment, one or more, for example about 1, 2, 3, 4, 5, 6, 7, 8, 9, 10, or more, pyrimidine nucleotides of the sense and/or antisense siNA strand are chemically-modified with 2′-deoxy, 2′-O-methyl and/or 2′-deoxy-2′-fluoro nucleotides, with or without one or more, for example about 1, 2, 3, 4, 5, 6, 7, 8, 9, 10, or more, phosphorothioate internucleotide linkages and/or a terminal cap molecule at the 3′-end, the 5′-end, or both of the 3′- and 5′-ends, being present in the same or different strand.

[0087] In another embodiment, the invention features a siNA molecule, wherein the sense strand comprises about 1 to about 5, specifically about 1, 2, 3, 4, or 5 phosphorothioate internucleotide linkages, and/or one or more (e.g., about 1, 2, 3, 4, 5, or more) 2′-deoxy, 2′-O-methyl, 2′-deoxy-2′-fluoro, and/or one or more (e.g., about 1, 2, 3, 4, 5, or more) universal base modified nucleotides, and optionally a terminal cap molecule at the 3-end, the 5′-end, or both of the 3′- and 5′-ends of the sense strand; and wherein the antisense strand comprises about 1 to about 5 or more, specifically about 1, 2, 3, 4, 5, or more phosphorothioate internucleotide linkages, and/or one or more (e.g., about 1, 2, 3, 4, 5, 6, 7, 8, 9, 10 or more) 2′-deoxy, 2′-O-methyl, 2′-deoxy-2′-fluoro, and/or one or more (e.g., about 1, 2, 3, 4, 5, 6, 7, 8, 9, 10 or more) universal base modified nucleotides, and optionally a terminal cap molecule at the 3′-end, the 5′-end, or both of the 3′- and 5′-ends of the antisense strand. In another embodiment, one or more, for example about 1, 2, 3, 4, 5, 6, 7, 8, 9, 10, or more, pyrimidine nucleotides of the sense and/or antisense siNA strand are chemically-modified with 2′-deoxy, 2′-O-methyl and/or 2′-deoxy-2′-fluoro nucleotides, with or without about 1 to about 5 or more, for example about 1, 2, 3, 4, 5, or more phosphorothioate internucleotide linkages and/or a terminal cap molecule at the 3′-end, the 5′-end, or both of the 3′- and 5′-ends, being present in the same or different strand.

[0088] In one embodiment, the invention features a siNA molecule, wherein the antisense strand comprises one or more, for example, about 1, 2, 3, 4, 5, 6, 7, 8, 9, 10, or more phosphorothioate internucleotide linkages, and/or about one or more (e.g., about 1, 2, 3, 4, 5, 6, 7, 8, 9, 10 or more) 2′-deoxy, 2′-O-methyl, 2′-deoxy-2′-fluoro, and/or one or more (e.g., about 1, 2, 3, 4, 5, 6, 7, 8, 9, 10 or more) universal base modified nucleotides, and optionally a terminal cap molecule at the 3′-end, the 5′-end, or both of the 3′- and 5′-ends of the sense strand; and wherein the antisense strand comprises about 1 to about 10 or more, specifically about 1, 2, 3, 4, 5, 6, 7, 8, 9, 10 or more phosphorothioate internucleotide linkages, and/or one or more (e.g., about 1, 2, 3, 4, 5, 6, 7, 8, 9, 10 or more) 2′-deoxy, 2′-O-methyl, 2′-deoxy-2′-fluoro, and/or one or more (e.g., about 1, 2, 3, 4, 5, 6, 7, 8, 9, 10 or more) universal base modified nucleotides, and optionally a terminal cap molecule at the 3′-end, the 5′-end, or both of the 3′- and 5′-ends of the antisense strand. In another embodiment, one or more, for example about 1, 2, 3, 4, 5, 6, 7, 8, 9, 10 or more pyrimidine nucleotides of the sense and/or antisense siNA strand are chemically-modified with 2′-deoxy, 2′-O-methyl and/or 2′-deoxy-2′-fluoro nucleotides, with or without one or more, for example, about 1, 2, 3, 4, 5, 6, 7, 8, 9, 10 or more phosphorothioate internucleotide linkages and/or a terminal cap molecule at the 3′-end, the 5′-end, or both of the 3′ and 5′-ends, being present in the same or different strand.

[0089] In another embodiment, the invention features a siNA molecule, wherein the antisense strand comprises about 1 to about 5 or more, specifically about 1, 2, 3, 4, 5 or more phosphorothioate internucleotide linkages, and/or one or more (e.g., about 1, 2, 3, 4, 5, 6, 7, 8, 9, 10 or more) 2′-deoxy, 2′-O-methyl, 2′-deoxy-2′-fluoro, and/or one or more (e.g., about 1, 2, 3, 4, 5, 6, 7, 8, 9, 10 or more) universal base modified nucleotides, and optionally a terminal cap molecule at the 3′-end, the 5′-end, or both of the 3′- and 5′-ends of the sense strand; and wherein the antisense strand comprises about 1 to about 5 or more, specifically about 1, 2, 3, 4, 5 or more phosphorothioate internucleotide linkages, and/or one or more (e.g., about 1, 2, 3, 4, 5, 6, 7, 8, 9, 10 or more) 2′-deoxy, 2′-O-methyl, 2′-deoxy-2′-fluoro, and/or one or more (e.g., about 1, 2, 3, 4, 5, 6, 7, 8, 9, 10 or more) universal base modified nucleotides, and optionally a terminal cap molecule at the 3′-end, the 5′-end, or both of the 3′- and 5′-ends of the antisense strand. In another embodiment, one or more, for example about 1, 2, 3, 4, 5, 6, 7, 8, 9, 10 or more pyrimidine nucleotides of the sense and/or antisense siNA strand are chemically-modified with 2′-deoxy, 2′-O-methyl and/or 2′-deoxy-2′-fluoro nucleotides, with or without about 1 to about 5, for example about 1, 2, 3, 4, 5 or more phosphorothioate internucleotide linkages and/or a terminal cap molecule at the 3′-end, the 5′-end, or both of the 3′- and 5′-ends, being present in the same or different strand.

[0090] In one embodiment, the invention features a chemically-modified short interfering nucleic acid (siNA) molecule having about 1 to about 5 or more (specifically about 1, 2, 3, 4, 5 or more) phosphorothioate internucleotide linkages in each strand of the siNA molecule.

[0091] In another embodiment, the invention features a siNA molecule comprising 2′-5′ internucleotide linkages. The 2′-5′ internucleotide linkage(s) can be at the 3′-end, the 5′-end, or both of the 3′- and 5′-ends of one or both siNA sequence strands. In addition, the 2′-5′ internucleotide linkage(s) can be present at various other positions within one or both siNA sequence strands, for example, about 1, 2, 3, 4, 5, 6, 7, 8, 9, 10, or more including every internucleotide linkage of a pyrimidine nucleotide in one or both strands of the siNA molecule can comprise a 2′-5′ internucleotide linkage, or about 1, 2, 3, 4, 5, 6, 7, 8, 9, 10, or more including every internucleotide linkage of a purine nucleotide in one or both strands of the siNA molecule can comprise a 2′-5′ internucleotide linkage.

[0092] In another embodiment, a chemically-modified siNA molecule of the invention comprises a duplex having two strands, one or both of which can be chemically-modified, wherein each strand is independently about 15 to about 30 (e.g., about 15, 16, 17, 18, 19, 20, 21, 22, 23, 24, 25, 26, 27, 28, 29, or 30) nucleotides in length, wherein the duplex has about 15 to about 30 (e.g., about 15, 16, 17, 18, 19, 20, 21, 22, 23, 24, 25, 26, 27, 28, 29, or 30) base pairs, and wherein the chemical modification comprises a structure having any of Formulae I-VII. For example, an exemplary chemically-modified siNA molecule of the invention comprises a duplex having two strands, one or both of which can be chemically-modified with a chemical modification having any of Formulae I-VII or any combination thereof, wherein each strand consists of about 21 nucleotides, each having a 2-nucleotide 3′-terminal nucleotide overhang, and wherein the duplex has about 19 base pairs. In another embodiment, a siNA molecule of the invention comprises a single stranded hairpin structure, wherein the siNA is about 36 to about 70 (e.g., about 36, 40, 45, 50, 55, 60, 65, or 70) nucleotides in length having about 15 to about 30 (e.g., about 15, 16, 17, 18, 19, 20, 21, 22, 23, 24, 25, 26, 27, 28, 29, or 30) base pairs, and wherein the siNA can include a chemical modification comprising a structure having any of Formulae I-VII or any combination thereof. For example, an exemplary chemically-modified siNA molecule of the invention comprises a linear oligonucleotide having about 42 to about 50 (e.g., about 42, 43, 44, 45, 46, 47, 48, 49, or
[0093] 50) nucleotides that is chemically-modified with a chemical modification having any of Formulae I-VII or any combination thereof, wherein the linear oligonucleotide forms a hairpin structure having about 19 to about 21 (e.g., 19, 20, or 21) base pairs and a 2-nucleotide 3′-terminal nucleotide overhang. In another embodiment, a linear hairpin siNA molecule of the invention contains a stem loop motif, wherein the loop portion of the siNA molecule is biodegradable. For example, a linear hairpin siNA molecule of the invention is designed such that degradation of the loop portion of the siNA molecule in vivo can generate a double-stranded siNA molecule with 3′-terminal overhangs, such as 3′-terminal nucleotide overhangs comprising about 2 nucleotides.

[0094] In another embodiment, a siNA molecule of the invention comprises a hairpin structure, wherein the siNA is about 25 to about 50 (e.g., about 25, 26, 27, 28, 29, 30, 31, 32, 33, 34, 35, 36, 37, 38, 39, 40, 41, 42, 43, 44, 45, 46, 47, 48, 49, or 50) nucleotides in length having about 3 to about 25 (e.g., about 3, 4, 5, 6, 7, 8, 9, 10, 11, 12, 13, 14, 15, 16, 17, 18, 19, 20, 21, 22, 23, 24, or 25) base pairs, and wherein the siNA can include one or more chemical modifications comprising a structure having any of Formulae I-VII or any combination thereof. For example, an exemplary chemically-modified siNA molecule of the invention comprises a linear oligonucleotide having about 25 to about 35 (e.g., about 25, 26, 27, 28, 29, 30, 31, 32, 33, 34, or 35) nucleotides that is chemically-modified with one or more chemical modifications having any of Formulae I-VII or any combination thereof, wherein the linear oligonucleotide forms a hairpin structure having about 3 to about 25 (e.g., about 3, 4, 5, 6, 7, 8, 9, 10, 11, 12, 13, 14, 15, 16, 17, 18, 19, 20, 21, 22, 23, 24, or 25) base pairs and a 5′-terminal phosphate group that can be chemically modified as described herein (for example a 5′-terminal phosphate group having Formula IV). In another embodiment, a linear hairpin siNA molecule of the invention contains a stem loop motif, wherein the loop portion of the siNA molecule is biodegradable. In one embodiment, a linear hairpin siNA molecule of the invention comprises a loop portion comprising a non-nucleotide linker.

[0095] In another embodiment, a siNA molecule of the invention comprises an asymmetric hairpin structure, wherein the siNA is about 25 to about 50 (e.g., about 25, 26, 27, 28, 29, 30, 31, 32, 33, 34, 35, 36, 37, 38, 39, 40, 41, 42, 43, 44, 45, 46, 47, 48, 49, or 50) nucleotides in length having about 3 to about 25 (e.g., about 3, 4, 5, 6, 7, 8, 9, 10, 11, 12, 13, 14, 15, 16, 17, 18, 19, 20, 21, 22, 23, 24, or 25) base pairs, and wherein the siNA can include one or more chemical modifications comprising a structure having any of Formulae I-VII or any combination thereof. For example, an exemplary chemically-modified siNA molecule of the invention comprises a linear oligonucleotide having about 25 to about 35 (e.g., about 25, 26, 27, 28, 29, 30, 31, 32, 33, 34, or 35) nucleotides that is chemically-modified with one or more chemical modifications having any of Formulae I-VII or any combination thereof, wherein the linear oligonucleotide forms an asymmetric hairpin structure having about 3 to about 25 (e.g., about 3, 4, 5, 6, 7, 8, 9, 10, 11, 12, 13, 14, 15, 16, 17, 18, 19, 20, 21, 22, 23, 24, or 25) base pairs and a 5′-terminal phosphate group that can be chemically modified as described herein (for example a 5′-terminal phosphate group having Formula IV). In one embodiment, an asymmetric hairpin siNA molecule of the invention contains a stem loop motif, wherein the loop portion of the siNA molecule is biodegradable. In another embodiment, an asymmetric hairpin siNA molecule of the invention comprises a loop portion comprising a non-nucleotide linker.

[0096] In another embodiment, a siNA molecule of the invention comprises an asymmetric double stranded structure having separate polynucleotide strands comprising sense and antisense regions, wherein the antisense region is about 15 to about 30 (e.g., about 15, 16, 17, 18, 19, 20, 21, 22, 23, 24, 25, 26, 27, 28, 29, or 30) nucleotides in length, wherein the sense region is about 3 to about 25 (e.g., about 3, 4, 5, 6, 7, 8, 9, 10, 11, 12, 13, 14, 15, 16, 17, 18, 19, 20, 21, 22, 23, 24, or 25) nucleotides in length, wherein the sense region and the antisense region have at least 3 complementary nucleotides, and wherein the siNA can include one or more chemical modifications comprising a structure having any of Formulae I-VII or any combination thereof. For example, an exemplary chemically-modified siNA molecule of the invention comprises an asymmetric double stranded structure having separate polynucleotide strands comprising sense and antisense regions, wherein the antisense region is about 18 to about 23 (e.g., about 18, 19, 20, 21, 22, or 23) nucleotides in length and wherein the sense region is about 3 to about 15 (e.g., about 3, 4, 5, 6, 7, 8, 9, 10, 11, 12, 13, 14, or 15) nucleotides in length, wherein the sense region the antisense region have at least 3 complementary nucleotides, and wherein the siNA can include one or more chemical modifications comprising a structure having any of Formulae I-VII or any combination thereof. In another embodiment, the asymmetic double stranded siNA molecule can also have a 5′-terminal phosphate group that can be chemically modified as described herein (for example a 5′-terminal phosphate group having Formula IV).

[0097] In another embodiment, a siNA molecule of the invention comprises a circular nucleic acid molecule, wherein the siNA is about 38 to about 70 (e.g., about 38, 40, 45, 50, 55, 60, 65, or 70) nucleotides in length having about 15 to about 30 (e.g., about 15, 16, 17, 18, 19, 20, 21, 22, 23, 24, 25, 26, 27, 28, 29, or 30) base pairs, and wherein the siNA can include a chemical modification, which comprises a structure having any of Formulae I-VII or any combination thereof. For example, an exemplary chemically-modified siNA molecule of the invention comprises a circular oligonucleotide having about 42 to about 50 (e.g., about 42, 43, 44, 45, 46, 47, 48, 49, or 50) nucleotides that is chemically-modified with a chemical modification having any of Formulae I-VII or any combination thereof, wherein the circular oligonucleotide forms a dumbbell shaped structure having about 19 base pairs and 2 loops.

[0098] In another embodiment, a circular siNA molecule of the invention contains two loop motifs, wherein one or both loop portions of the siNA molecule is biodegradable. For example, a circular siNA molecule of the invention is designed such that degradation of the loop portions of the siNA molecule in vivo can generate a double-stranded siNA molecule with 3′-terminal overhangs, such as 3′-terminal nucleotide overhangs comprising about 2 nucleotides.

[0099] In one embodiment, a siNA molecule of the invention comprises at least one (e.g., about 1, 2, 3, 4, 5, 6, 7, 8, 9, 10, or more) abasic moiety, for example a compound having Formula V: [chemical structure]
wherein each R3, R4, R5, R6, R7, R8, R10, R11, R12, and R13 is independently H, OH, alkyl, substituted alkyl, alkaryl or aralkyl, F, Cl, Br, CN, CF3, OCF3, OCN, O-alkyl, S-alkyl, N-alkyl, O-alkenyl, S-alkenyl, N-alkenyl, SO-alkyl, alkyl-OSH, alkyl-OH, O-alkyl-OH, O-alkyl-SH, S-alkyl-OH, S-alkyl-SH, alkyl-S-alkyl, alkyl-O-alkyl, ONO₂, NO₂, N3, NH2, aminoalkyl, aminoacid, aminoacyl, ONH2, O-aminoalkyl, O-aminoacid, O-aminoacyl, heterocycloalkyl, heterocycloalkaryl, aminoalkylamino, polyalklylamino, substituted silyl, or group having Formula I or II; R9 is O, S, CH2, S═O, CHF, or CF2.

[0100] In one embodiment, a siNA molecule of the invention comprises at least one (e.g., about 1, 2, 3, 4, 5, 6, 7, 8, 9, 10, or more) inverted abasic moiety, for example a compound having Formula VI: [chemical structure]
wherein each R3, R4, R5, R6, R7, R8, R10, R11, R12, and R13 is independently H, OH, alkyl, substituted alkyl, alkaryl or aralkyl, F, Cl, Br, CN, CF3, OCF3, OCN, O-alkyl, S-alkyl, N-alkyl, O-alkenyl, S-alkenyl, N-alkenyl, SO-alkyl, alkyl-OSH, alkyl-OH, O-alkyl-OH, O-alkyl-SH, S-alkyl-OH, S-alkyl-SH, alkyl-S-alkyl, alkyl-O-alkyl, ONO₂, NO₂, N3, NH2, aminoalkyl, aminoacid, aminoacyl, ONH2, O-aminoalkyl, O-aminoacid, O-aminoacyl, heterocycloalkyl, heterocycloalkaryl, aminoalkylamino, polyalklylamino, substituted silyl, or group having Formula I or II; R9 is O, S, CH2, S═O, CHF, or CF2, and either R2, R3, R8 or R13 serve as points of attachment to the siNA molecule of the invention.

[0101] In another embodiment, a siNA molecule of the invention comprises at least one (e.g., about 1, 2, 3, 4, 5, 6, 7, 8, 9, 10, or more) substituted polyalkyl moieties, for example a compound having Formula VII: [chemical structure]
wherein each n is independently an integer from 1 to 12, each R1, R2 and R3 is independently H, OH, alkyl, substituted alkyl, alkaryl or aralkyl, F, Cl, Br, CN, CF3, OCF3, OCN, O-alkyl, S-alkyl, N-alkyl, O-alkenyl, S-alkenyl, N-alkenyl, SO-alkyl, alkyl-OSH, alkyl-OH, O-alkyl-OH, O-alkyl-SH, S-alkyl-OH, S-alkyl-SH, alkyl-S-alkyl, alkyl-O-alkyl, ONO₂, NO2, N3, NH2, aminoalkyl, aminoacid, aminoacyl, ONH2, O-aminoalkyl, O-aminoacid, O-aminoacyl, heterocycloalkyl, heterocycloalkaryl, aminoalkylamino, polyalklylamino, substituted silyl, or a group having Formula I, and R1, R2 or R3 serves as points of attachment to the siNA molecule of the invention.

[0102] In another embodiment, the invention features a compound having Formula VII, wherein R1 and R2 are hydroxyl (OH) groups, n=1, and R3 comprises 0 and is the point of attachment to the 3′-end, the 5′-end, or both of the 3′ and 5′-ends of one or both strands of a double-stranded siNA molecule of the invention or to a single-stranded siNA molecule of the invention. This modification is referred to herein as “glyceryl” (for example modification 6 in FIG. 10).

[0103] In another embodiment, a chemically modified nucleoside or non-nucleoside (e.g. a moiety having any of Formula V, VI or VII) of the invention is at the 3′-end, the 5′-end, or both of the 3′ and 5′-ends of a siNA molecule of the invention. For example, chemically modified nucleoside or non-nucleoside (e.g., a moiety having Formula V, VI or VII) can be present at the 3′-end, the 5′-end, or both of the 3′ and 5′-ends of the antisense strand, the sense strand, or both antisense and sense strands of the siNA molecule. In one embodiment, the chemically modified nucleoside or non-nucleoside (e.g., a moiety having Formula V, VI or VII) is present at the 5′-end and 3′-end of the sense strand and the 3′-end of the antisense strand of a double stranded siNA molecule of the invention. In one embodiment, the chemically modified nucleoside or non-nucleoside (e.g., a moiety having Formula V, VI or VII) is present at the terminal position of the 5′-end and 3′-end of the sense strand and the 3′-end of the antisense strand of a double stranded siNA molecule of the invention. In one embodiment, the chemically modified nucleoside or non-nucleoside (e.g., a moiety having Formula V, VI or VII) is present at the two terminal positions of the 5′-end and 3′-end of the sense strand and the 3′-end of the antisense strand of a double stranded siNA molecule of the invention. In one embodiment, the chemically modified nucleoside or non-nucleoside (e.g., a moiety having Formula V, VI or VII) is present at the penultimate position of the 5′-end and 3′-end of the sense strand and the 3′-end of the antisense strand of a double stranded siNA molecule of the invention. In addition, a moiety having Formula VII can be present at the 3′-end or the 5′-end of a hairpin siNA molecule as described herein.

[0104] In another embodiment, a siNA molecule of the invention comprises an abasic residue having Formula V or VI, wherein the abasic residue having Formula VI or VI is connected to the siNA construct in a 3′-3′,3′-2′,2′-3′, or 5′-5′ configuration, such as at the 3′-end, the 5′-end, or both of the 3′ and 5′-ends of one or both siNA strands.

[0105] In one embodiment, a siNA molecule of the invention comprises one or more (e.g., about 1, 2, 3, 4, 5, 6, 7, 8, 9, 10, or more) locked nucleic acid (LNA) nucleotides, for example, at the 5′-end, the 3′-end, both of the 5′ and 3′-ends, or any combination thereof, of the siNA molecule.

[0106] In another embodiment, a siNA molecule of the invention comprises one or more (e.g., about 1, 2, 3, 4, 5, 6, 7, 8, 9, 10, or more) acyclic nucleotides, for example, at the 5′-end, the 3′-end, both of the 5′ and 3′-ends, or any combination thereof, of the siNA molecule.

[0107] In one embodiment, the invention features a chemically-modified short interfering nucleic acid (siNA) molecule of the invention comprising a sense region, wherein any (e.g., one or more or all) pyrimidine nucleotides present in the sense region are 2′-deoxy-2′-fluoro pyrimidine nucleotides (e.g., wherein all pyrimidine nucleotides are 2′-deoxy-2′-fluoro pyrimidine nucleotides or alternately a plurality of pyrimidine nucleotides are 2′-deoxy-2′-fluoro pyrimidine nucleotides), and wherein any (e.g., one or more or all) purine nucleotides present in the sense region are 2′-deoxy purine nucleotides (e.g., wherein all purine nucleotides are 2′-deoxy purine nucleotides or alternately a plurality of purine nucleotides are 2′-deoxy purine nucleotides).

[0108] In one embodiment, the invention features a chemically-modified short interfering nucleic acid (siNA) molecule of the invention comprising a sense region, wherein any (e.g., one or more or all) pyrimidine nucleotides present in the sense region are 2′-deoxy-2′-fluoro pyrimidine nucleotides (e.g., wherein all pyrimidine nucleotides are 2′-deoxy-2′-fluoro pyrimidine nucleotides or alternately a plurality of pyrimidine nucleotides are 2′-deoxy-2′-fluoro pyrimidine nucleotides), and wherein any (e.g., one or more or all) purine nucleotides present in the sense region are 2′-deoxy purine nucleotides (e.g., wherein all purine nucleotides are 2′-deoxy purine nucleotides or alternately a plurality of purine nucleotides are 2′-deoxy purine nucleotides), wherein any nucleotides comprising a 3′-terminal nucleotide overhang that are present in said sense region are ₂′-deoxy nucleotides.

[0109] In one embodiment, the invention features a chemically-modified short interfering nucleic acid (siNA) molecule of the invention comprising a sense region, wherein any (e.g., one or more or all) pyrimidine nucleotides present in the sense region are 2′-deoxy-2′-fluoro pyrimidine nucleotides (e.g., wherein all pyrimidine nucleotides are 2′-deoxy-2′-fluoro pyrimidine nucleotides or alternately a plurality of pyrimidine nucleotides are 2′-deoxy-2′-fluoro pyrimidine nucleotides), and wherein any (e.g., one or more or all) purine nucleotides present in the sense region are 2′-O-methyl purine nucleotides (e.g., wherein all purine nucleotides are 2′-O-methyl purine nucleotides or alternately a plurality of purine nucleotides are 2′-O-methyl purine nucleotides).

[0110] In one embodiment, the invention features a chemically-modified short interfering nucleic acid (siNA) molecule of the invention comprising a sense region, wherein any (e.g., one or more or all) pyrimidine nucleotides present in the sense region are 2′-deoxy-2′-fluoro pyrimidine nucleotides (e.g., wherein all pyrimidine nucleotides are 2′-deoxy-2′-fluoro pyrimidine nucleotides or alternately a plurality of pyrimidine nucleotides are 2′-deoxy-2′-fluoro pyrimidine nucleotides), wherein any (e.g., one or more or all) purine nucleotides present in the sense region are 2′-O-methyl purine nucleotides (e.g., wherein all purine nucleotides are 2′-O-methyl purine nucleotides or alternately a plurality of purine nucleotides are 2′-O-methyl purine nucleotides), and wherein any nucleotides comprising a 3′-terminal nucleotide overhang that are present in said sense region are 2′-deoxy nucleotides.

[0111] In one embodiment, the invention features a chemically-modified short interfering nucleic acid (siNA) molecule of the invention comprising an antisense region, wherein any (e.g., one or more or all) pyrimidine nucleotides present in the antisense region are 2′-deoxy-2′-fluoro pyrimidine nucleotides (e.g., wherein all pyrimidine nucleotides are 2′-deoxy-2′-fluoro pyrimidine nucleotides or alternately a plurality of pyrimidine nucleotides are 2′-deoxy-2′-fluoro pyrimidine nucleotides), and wherein any (e.g., one or more or all) purine nucleotides present in the antisense region are 2′-O-methyl purine nucleotides (e.g., wherein all purine nucleotides are 2′-O-methyl purine nucleotides or alternately a plurality of purine nucleotides are 2′-O-methyl purine nucleotides).

[0112] In one embodiment, the invention features a chemically-modified short interfering nucleic acid (siNA) molecule of the invention comprising an antisense region, wherein any (e.g., one or more or all) pyrimidine nucleotides present in the antisense region are 2′-deoxy-2′-fluoro pyrimidine nucleotides (e.g., wherein all pyrimidine nucleotides are 2′-deoxy-2′-fluoro pyrimidine nucleotides or alternately a plurality of pyrimidine nucleotides are 2′-deoxy-2′-fluoro pyrimidine nucleotides), wherein any (e.g., one or more or all) purine nucleotides present in the antisense region are 2′-O-methyl purine nucleotides (e.g., wherein all purine nucleotides are 2′-O-methyl purine nucleotides or alternately a plurality of purine nucleotides are 2′-O-methyl purine nucleotides), and wherein any nucleotides comprising a 3′-terminal nucleotide overhang that are present in said antisense region are 2′-deoxy nucleotides.

[0113] In one embodiment, the invention features a chemically-modified short interfering nucleic acid (siNA) molecule of the invention comprising an antisense region, wherein any (e.g., one or more or all) pyrimidine nucleotides present in the antisense region are 2′-deoxy-2′-fluoro pyrimidine nucleotides (e.g., wherein all pyrimidine nucleotides are 2′-deoxy-2′-fluoro pyrimidine nucleotides or alternately a plurality of pyrimidine nucleotides are 2′-deoxy-2′-fluoro pyrimidine nucleotides), and wherein any (e.g., one or more or all) purine nucleotides present in the antisense region are 2′-deoxy purine nucleotides (e.g., wherein all purine nucleotides are 2′-deoxy purine nucleotides or alternately a plurality of purine nucleotides are 2′-deoxy purine nucleotides).

[0114] In one embodiment, the invention features a chemically-modified short interfering nucleic acid (siNA) molecule of the invention comprising an antisense region, wherein any (e.g., one or more or all) pyrimidine nucleotides present in the antisense region are 2′-deoxy-2′-fluoro pyrimidine nucleotides (e.g., wherein all pyrimidine nucleotides are 2′-deoxy-2′-fluoro pyrimidine nucleotides or alternately a plurality of pyrimidine nucleotides are 2′-deoxy-2′-fluoro pyrimidine nucleotides), and wherein any (e.g., one or more or all) purine nucleotides present in the antisense region are 2′-O-methyl purine nucleotides (e.g., wherein all purine nucleotides are 2′-O-methyl purine nucleotides or alternately a plurality of purine nucleotides are 2′-O-methyl purine nucleotides).

[0115] In one embodiment, the invention features a chemically-modified short interfering nucleic acid (siNA) molecule of the invention capable of mediating RNA interference (RNAi) against BCR-ABL and/or ERG inside a cell or reconstituted in vitro system comprising a sense region, wherein one or more pyrimidine nucleotides present in the sense region are 2′-deoxy-2′-fluoro pyrimidine nucleotides (e.g., wherein all pyrimidine nucleotides are 2′-deoxy-2′-fluoro pyrimidine nucleotides or alternately a plurality of pyrimidine nucleotides are 2′-deoxy-2′-fluoro pyrimidine nucleotides), and one or more purine nucleotides present in the sense region are 2′-deoxy purine nucleotides (e.g., wherein all purine nucleotides are 2′-deoxy purine nucleotides or alternately a plurality of purine nucleotides are 2′-deoxy purine nucleotides), and an antisense region, wherein one or more pyrimidine nucleotides present in the antisense region are 2′-deoxy-2′-fluoro pyrimidine nucleotides (e.g., wherein all pyrimidine nucleotides are 2′-deoxy-2′-fluoro pyrimidine nucleotides or alternately a plurality of pyrimidine nucleotides are 2′-deoxy-2′-fluoro pyrimidine nucleotides), and one or more purine nucleotides present in the antisense region are 2′-O-methyl purine nucleotides (e.g., wherein all purine nucleotides are 2′-O-methyl purine nucleotides or alternately a plurality of purine nucleotides are 2′-O-methyl purine nucleotides). The sense region and/or the antisense region can have a terminal cap modification, such as any modification described herein or shown in FIG. 10, that is optionally present at the 3′-end, the 5′-end, or both of the 3′ and 5′-ends of the sense and/or antisense sequence. The sense and/or antisense region can optionally further comprise a 3′-terminal nucleotide overhang having about 1 to about 4 (e.g., about 1, 2, 3, or 4) 2′-deoxynucleotides. The overhang nucleotides can further comprise one or more (e.g., about 1, 2, 3, 4 or more) phosphorothioate, phosphonoacetate, and/or thiophosphonoacetate internucleotide linkages. Non-limiting examples of these chemically-modified siNAs are shown in FIGS. 4 and 5 and Tables III and IV herein. In any of these described embodiments, the purine nucleotides present in the sense region are alternatively 2′-O-methyl purine nucleotides (e.g., wherein all purine nucleotides are 2′-O-methyl purine nucleotides or alternately a plurality of purine nucleotides are 2′-O-methyl purine nucleotides) and one or more purine nucleotides present in the antisense region are 2′-O-methyl purine nucleotides (e.g., wherein all purine nucleotides are 2′-O-methyl purine nucleotides or alternately a plurality of purine nucleotides are 2′-O-methyl purine nucleotides). Also, in any of these embodiments, one or more purine nucleotides present in the sense region are alternatively purine ribonucleotides (e.g., wherein all purine nucleotides are purine ribonucleotides or alternately a plurality of purine nucleotides are purine ribonucleotides) and any purine nucleotides present in the antisense region are 2′-O-methyl purine nucleotides (e.g., wherein all purine nucleotides are 2′-O-methyl purine nucleotides or alternately a plurality of purine nucleotides are 2′-O-methyl purine nucleotides). Additionally, in any of these embodiments, one or more purine nucleotides present in the sense region and/or present in the antisense region are alternatively selected from the group consisting of 2′-deoxy nucleotides, locked nucleic acid (LNA) nucleotides, 2′-methoxyethyl nucleotides, 4′-thionucleotides, and 2′-O-methyl nucleotides (e.g., wherein all purine nucleotides are selected from the group consisting of 2′-deoxy nucleotides, locked nucleic acid (LNA) nucleotides, 2′-methoxyethyl nucleotides, 4′-thionucleotides, and 2′-O-methyl nucleotides or alternately a plurality of purine nucleotides are selected from the group consisting of 2′-deoxy nucleotides, locked nucleic acid (LNA) nucleotides, 2′-methoxyethyl nucleotides, 4′-thionucleotides, and 2′-O-methyl nucleotides).

[0116] In another embodiment, any modified nucleotides present in the siNA molecules of the invention, preferably in the antisense strand of the siNA molecules of the invention, but also optionally in the sense and/or both antisense and sense strands, comprise modified nucleotides having properties or characteristics similar to naturally occurring ribonucleotides. For example, the invention features siNA molecules including modified nucleotides having a Northern conformation (e.g., Northern pseudorotation cycle, see for example Saenger, Principles of Nucleic Acid Structure, Springer-Verlag ed., 1984). As such, chemically modified nucleotides present in the siNA molecules of the invention, preferably in the antisense strand of the siNA molecules of the invention, but also optionally in the sense and/or both antisense and sense strands, are resistant to nuclease degradation while at the same time maintaining the capacity to mediate RNAi. Non-limiting examples of nucleotides having a northern configuration include locked nucleic acid (LNA) nucleotides (e.g., 2′-O, 4′-C-methylene-(D-ribofuranosyl) nucleotides); 2′-methoxyethoxy (MOE) nucleotides; 2′-methyl-thio-ethyl, 2′-deoxy-2′-fluoro nucleotides, 2′-deoxy-2′-chloro nucleotides, 2′-azido nucleotides, and 2′-O-methyl nucleotides.

[0117] In one embodiment, the sense strand of a double stranded siNA molecule of the invention comprises a terminal cap moiety, (see for example FIG. 10) such as an inverted deoxyabaisc moiety, at the 3′-end, 5′-end, or both 3′ and 5′-ends of the sense strand.

[0118] In one embodiment, the invention features a chemically-modified short interfering nucleic acid molecule (siNA) capable of mediating RNA interference (RNAi) against BCR-ABL and/or ERG inside a cell or reconstituted in vitro system, wherein the chemical modification comprises a conjugate covalently attached to the chemically-modified siNA molecule. Non-limiting examples of conjugates contemplated by the invention include conjugates and ligands described in Vargeese et al., U.S. Ser. No. 10/427,160, filed Apr. 30, 2003, incorporated by reference herein in its entirety, including the drawings. In another embodiment, the conjugate is covalently attached to the chemically-modified siNA molecule via a biodegradable linker. In one embodiment, the conjugate molecule is attached at the 3′-end of either the sense strand, the antisense strand, or both strands of the chemically-modified siNA molecule. In another embodiment, the conjugate molecule is attached at the 5′-end of either the sense strand, the antisense strand, or both strands of the chemically-modified siNA molecule. In yet another embodiment, the conjugate molecule is attached both the 3′-end and 5′-end of either the sense strand, the antisense strand, or both strands of the chemically-modified siNA molecule, or any combination thereof. In one embodiment, a conjugate molecule of the invention comprises a molecule that facilitates delivery of a chemically-modified siNA molecule into a biological system, such as a cell. In another embodiment, the conjugate molecule attached to the chemically-modified siNA molecule is a polyethylene glycol, human serum albumin, or a ligand for a cellular receptor that can mediate cellular uptake. Examples of specific conjugate molecules contemplated by the instant invention that can be attached to chemically-modified siNA molecules are described in Vargeese et al., U.S. Ser. No. 10/201,394, filed Jul. 22, 2002 incorporated by reference herein. The type of conjugates used and the extent of conjugation of siNA molecules of the invention can be evaluated for improved pharmacokinetic profiles, bioavailability, and/or stability of siNA constructs while at the same time maintaining the ability of the siNA to mediate RNAi activity. As such, one skilled in the art can screen siNA constructs that are modified with various conjugates to determine whether the siNA conjugate complex possesses improved properties while maintaining the ability to mediate RNAi, for example in animal models as are generally known in the art.

[0119] In one embodiment, the invention features a short interfering nucleic acid (siNA) molecule of the invention, wherein the siNA further comprises a nucleotide, non-nucleotide, or mixed nucleotide/non-nucleotide linker that joins the sense region of the siNA to the antisense region of the siNA. In one embodiment, a nucleotide linker of the invention can be a linker of >2 nucleotides in length, for example about 3, 4, 5, 6, 7, 8, 9, or 10 nucleotides in length. In another embodiment, the nucleotide linker can be a nucleic acid aptamer. By “aptamer” or “nucleic acid aptamer” as used herein is meant a nucleic acid molecule that binds specifically to a target molecule wherein the nucleic acid molecule has sequence that comprises a sequence recognized by the target molecule in its natural setting. Alternately, an aptamer can be a nucleic acid molecule that binds to a target molecule where the target molecule does not naturally bind to a nucleic acid. The target molecule can be any molecule of interest. For example, the aptamer can be used to bind to a ligand-binding domain of a protein, thereby preventing interaction of the naturally occurring ligand with the protein. This is a non-limiting example and those in the art will recognize that other embodiments can be readily generated using techniques generally known in the art. (See, for example, Gold et al., 1995, Annu. Rev. Biochem., 64, 763; Brody and Gold, 2000, J Biotechnol., 74, 5; Sun, 2000, Curr. Opin. Mol. Ther., 2, 100; Kusser, 2000, J. Biotechnol., 74, 27; Hermann and Patel, 2000, Science, 287, 820; and Jayasena, 1999, Clinical Chemistry, 45, 1628.) In yet another embodiment, a non-nucleotide linker of the invention comprises abasic nucleotide, polyether, polyamine, polyamide, peptide, carbohydrate, lipid, polyhydrocarbon, or other polymeric compounds (e.g. polyethylene glycols such as those having between 2 and 100 ethylene glycol units). Specific examples include those described by Seela and Kaiser, Nucleic Acids Res. 1990, 18: 6353 and Nucleic Acids Res. 1987, 15: 3113; Cload and Schepartz, J. Am. Chem. Soc. 1991, 113: 6324; Richardson and Schepartz, J. Am. Chem. Soc. 1991, 113: 5109; Ma et al., Nucleic Acids Res. 1993, 21: 2585 and Biochemistry 1993, 32: 1751; Durand et al., Nucleic Acids Res. 1990, 18: 6353; McCurdy et al., Nucleosides & Nucleotides 1991, 10: 287; Jschke et al., Tetrahedron Lett. 1993, 34: 301; Ono et al., Biochemistry 1991, 30: 9914; Arnold et al., International Publication No. WO 89/02439; Usman et al., International Publication No. WO 95/06731; Dudycz et al., International Publication No. WO 95/11910 and Ferentz and Verdine, J. Am. Chem. Soc. 1991, 113: 4000, all hereby incorporated by reference herein. A “non-nucleotide” further means any group or compound that can be incorporated into a nucleic acid chain in the place of one or more nucleotide units, including either sugar and/or phosphate substitutions, and allows the remaining bases to exhibit their enzymatic activity. The group or compound can be abasic in that it does not contain a commonly recognized nucleotide base, such as adenosine, guanine, cytosine, uracil or thymine, for example at the Cl position of the sugar.

[0120] In one embodiment, the invention features a short interfering nucleic acid (siNA) molecule capable of mediating RNA interference (RNAi) inside a cell or reconstituted in vitro system, wherein one or both strands of the siNA molecule that are assembled from two separate oligonucleotides do not comprise any ribonucleotides. For example, a siNA molecule can be assembled from a single oligonculeotide where the sense and antisense regions of the siNA comprise separate oligonucleotides that do not have any ribonucleotides (e.g., nucleotides having a 2′-OH group) present in the oligonucleotides. In another example, a siNA molecule can be assembled from a single oligonculeotide where the sense and antisense regions of the siNA are linked or circularized by a nucleotide or non-nucleotide linker as described herein, wherein the oligonucleotide does not have any ribonucleotides (e.g., nucleotides having a 2′-OH group) present in the oligonucleotide. Applicant has surprisingly found that the presense of ribonucleotides (e.g., nucleotides having a 2′-hydroxyl group) within the siNA molecule is not required or essential to support RNAi activity. As such, in one embodiment, all positions within the siNA can include chemically modified nucleotides and/or non-nucleotides such as nucleotides and or non-nucleotides having Formula I, II, III, IV, V, VI, or VII or any combination thereof to the extent that the ability of the siNA molecule to support RNAi activity in a cell is maintained.

[0121] In one embodiment, a siNA molecule of the invention is a single stranded siNA molecule that mediates RNAi activity in a cell or reconstituted in vitro system comprising a single stranded polynucleotide having complementarity to a target nucleic acid sequence. In another embodiment, the single stranded siNA molecule of the invention comprises a 5′-terminal phosphate group. In another embodiment, the single stranded siNA molecule of the invention comprises a 5′-terminal phosphate group and a 3′-terminal phosphate group (e.g., a 2′,3′-cyclic phosphate). In another embodiment, the single stranded siNA molecule of the invention comprises about 15 to about 30 (e.g., about 15, 16, 17, 18, 19, 20, 21, 22, 23, 24, 25, 26, 27, 28, 29, or 30) nucleotides. In yet another embodiment, the single stranded siNA molecule of the invention comprises one or more chemically modified nucleotides or non-nucleotides described herein. For example, all the positions within the siNA molecule can include chemically-modified nucleotides such as nucleotides having any of Formulae I-VII, or any combination thereof to the extent that the ability of the siNA molecule to support RNAi activity in a cell is maintained.

[0122] In one embodiment, a siNA molecule of the invention is a single stranded siNA molecule that mediates RNAi activity in a cell or reconstituted in vitro system comprising a single stranded polynucleotide having complementarity to a target nucleic acid sequence, wherein one or more pyrimidine nucleotides present in the siNA are 2′-deoxy-2′-fluoro pyrimidine nucleotides (e.g., wherein all pyrimidine nucleotides are 2′-deoxy-2′-fluoro pyrimidine nucleotides or alternately a plurality of pyrimidine nucleotides are 2′-deoxy-2′-fluoro pyrimidine nucleotides), and wherein any purine nucleotides present in the antisense region are 2′-O-methyl purine nucleotides (e.g., wherein all purine nucleotides are 2′-O-methyl purine nucleotides or alternately a plurality of purine nucleotides are 2′-O-methyl purine nucleotides), and a terminal cap modification, such as any modification described herein or shown in FIG. 10, that is optionally present at the 3′-end, the 5′-end, or both of the 3′ and 5′-ends of the antisense sequence. The siNA optionally further comprises about 1 to about 4 or more (e.g., about 1, 2, 3, 4 or more) terminal 2′-deoxynucleotides at the 3′-end of the siNA molecule, wherein the terminal nucleotides can further comprise one or more (e.g., 1, 2, 3, 4 or more) phosphorothioate, phosphonoacetate, and/or thiophosphonoacetate internucleotide linkages, and wherein the siNA optionally further comprises a terminal phosphate group, such as a 5′-temminal phosphate group. In any of these embodiments, any purine nucleotides present in the antisense region are alternatively 2′-deoxy purine nucleotides (e.g., wherein all purine nucleotides are 2′-deoxy purine nucleotides or alternately a plurality of purine nucleotides are 2′-deoxy purine nucleotides). Also, in any of these embodiments, any purine nucleotides present in the siNA (i.e., purine nucleotides present in the sense and/or antisense region) can alternatively be locked nucleic acid (LNA) nucleotides (e.g., wherein all purine nucleotides are LNA nucleotides or alternately a plurality of purine nucleotides are LNA nucleotides). Also, in any of these embodiments, any purine nucleotides present in the siNA are alternatively 2′-methoxyethyl purine nucleotides (e.g., wherein all purine nucleotides are 2′-methoxyethyl purine nucleotides or alternately a plurality of purine nucleotides are 2′-methoxyethyl purine nucleotides). In another embodiment, any modified nucleotides present in the single stranded siNA molecules of the invention comprise modified nucleotides having properties or characteristics similar to naturally occurring ribonucleotides. For example, the invention features siNA molecules including modified nucleotides having a Northern conformation (e.g., Northern pseudorotation cycle, see for example Saenger, Principles of Nucleic Acid Structure, Springer-Verlag ed., 1984). As such, chemically modified nucleotides present in the single stranded siNA molecules of the invention are preferably resistant to nuclease degradation while at the same time maintaining the capacity to mediate RNAi.

[0123] In one embodiment, a siNA molecule of the invention comprises chemically modified nucleotides or non-nucleotides (e.g., having any of Formulae I-VII, such as 2′-deoxy, 2′-deoxy-2′-fluoro, or 2′-O-methyl nucleotides) at alternating positions within one or more strands or regions of the siNA molecule. For example, such chemical modifications can be introduced at every other position of a RNA based siNA molecule, starting at either the first or second nucleotide from the 3′-end or 5′-end of the siNA. In a non-limiting example, a double stranded siNA molecule of the invention in which each strand of the siNA is 21 nucleotides in length is featured wherein positions 1, 3, 5, 7, 9, 11, 13, 15, 17, 19 and 21 of each strand are chemically modified (e.g., with compounds having any of Formulae 1-VII, such as such as 2′-deoxy, 2′-deoxy-2′-fluoro, or 2′-O-methyl nucleotides). In another non-limiting example, a double stranded siNA molecule of the invention in which each strand of the siNA is 21 nucleotides in length is featured wherein positions 2, 4, 6, 8, 10, 12, 14, 16, 18, and 20 of each strand are chemically modified (e.g., with compounds having any of Formulae 1-VII, such as such as 2′-deoxy, 2′-deoxy-2′-fluoro, or 2′-O-methyl nucleotides). Such siNA molecules can further comprise terminal cap moieties and/or backbone modifications as described herein.

[0124] In one embodiment, the invention features a method for modulating the expression of a BCR-ABL and/or ERG gene within a cell comprising: (a) synthesizing a siNA molecule of the invention, which can be chemically-modified, wherein one of the siNA strands comprises a sequence complementary to RNA of the BCR-ABL and/or ERG gene; and (b) introducing the siNA molecule into a cell under conditions suitable to modulate the expression of the BCR-ABL and/or ERG gene in the cell.

[0125] In one embodiment, the invention features a method for modulating the expression of a BCR-ABL and/or ERG gene within a cell comprising: (a) synthesizing a siNA molecule of the invention, which can be chemically-modified, wherein one of the siNA strands comprises a sequence complementary to RNA of the BCR-ABL and/or ERG gene and wherein the sense strand sequence of the siNA comprises a sequence identical or substantially similar to the sequence of the target RNA; and (b) introducing the siNA molecule into a cell under conditions suitable to modulate the expression of the BCR-ABL and/or ERG gene in the cell.

[0126] In another embodiment, the invention features a method for modulating the expression of more than one BCR-ABL and/or ERG gene within a cell comprising: (a) synthesizing siNA molecules of the invention, which can be chemically-modified, wherein one of the siNA strands comprises a sequence complementary to RNA of the BCR-ABL and/or ERG genes; and (b) introducing the siNA molecules into a cell under conditions suitable to modulate the expression of the BCR-ABL and/or ERG genes in the cell.

[0127] In another embodiment, the invention features a method for modulating the expression of two or more BCR-ABL and/or ERG genes within a cell comprising: (a) synthesizing one or more siNA molecules of the invention, which can be chemically-modified, wherein the siNA strands comprise sequences complementary to RNA of the BCR-ABL and/or ERG genes and wherein the sense strand sequences of the siNAs comprise sequences identical or substantially similar to the sequences of the target RNAs; and (b) introducing the siNA molecules into a cell under conditions suitable to modulate the expression of the BCR-ABL and/or ERG genes in the cell.

[0128] In another embodiment, the invention features a method for modulating the expression of more than one BCR-ABL and/or ERG gene within a cell comprising: (a) synthesizing a siNA molecule of the invention, which can be chemically-modified, wherein one of the siNA strands comprises a sequence complementary to RNA of the BCR-ABL and/or ERG gene and wherein the sense strand sequence of the siNA comprises a sequence identical or substantially similar to the sequences of the target RNAs; and (b) introducing the siNA molecule into a cell under conditions suitable to modulate the expression of the BCR-ABL and/or ERG genes in the cell.

[0129] In one embodiment, siNA molecules of the invention are used as reagents in ex vivo applications. For example, siNA reagents are introduced into tissue or cells that are transplanted into a subject for therapeutic effect. The cells and/or tissue can be derived from an organism or subject that later receives the explant, or can be derived from another organism or subject prior to transplantation. The siNA molecules can be used to modulate the expression of one or more genes in the cells or tissue, such that the cells or tissue obtain a desired phenotype or are able to perform a function when transplanted in vivo. In one embodiment, certain target cells from a patient are extracted. These extracted cells are contacted with siNAs targeting a specific nucleotide sequence within the cells under conditions suitable for uptake of the siNAs by these cells (e.g. using delivery reagents such as cationic lipids, liposomes and the like or using techniques such as electroporation to facilitate the delivery of siNAs into cells). The cells are then reintroduced back into the same patient or other patients. In one embodiment, the invention features a method of modulating the expression of a BCR-ABL and/or ERG gene in a tissue explant comprising: (a) synthesizing a siNA molecule of the invention, which can be chemically-modified, wherein one of the siNA strands comprises a sequence complementary to RNA of the BCR-ABL and/or ERG gene; and (b) introducing the siNA molecule into a cell of the tissue explant derived from a particular organism under conditions suitable to modulate the expression of the BCR-ABL and/or ERG gene in the tissue explant. In another embodiment, the method further comprises introducing the tissue explant back into the organism the tissue was derived from or into another organism under conditions suitable to modulate the expression of the BCR-ABL and/or ERG gene in that organism.

[0130] In one embodiment, the invention features a method of modulating the expression of a BCR-ABL and/or ERG gene in a tissue explant comprising: (a) synthesizing a siNA molecule of the invention, which can be chemically-modified, wherein one of the siNA strands comprises a sequence complementary to RNA of the BCR-ABL and/or ERG gene and wherein the sense strand sequence of the siNA comprises a sequence identical or substantially similar to the sequence of the target RNA; and (b) introducing the siNA molecule into a cell of the tissue explant derived from a particular organism under conditions suitable to modulate the expression of the BCR-ABL and/or ERG gene in the tissue explant. In another embodiment, the method further comprises introducing the tissue explant back into the organism the tissue was derived from or into another organism under conditions suitable to modulate the expression of the BCR-ABL and/or ERG gene in that organism.

[0131] In another embodiment, the invention features a method of modulating the expression of more than one BCR-ABL and/or ERG gene in a tissue explant comprising:
[0132] (a) synthesizing siNA molecules of the invention, which can be chemically-modified, wherein one of the siNA strands comprises a sequence complementary to RNA of the BCR-ABL and/or ERG genes; and (b) introducing the siNA molecules into a cell of the tissue explant derived from a particular organism under conditions suitable to modulate the expression of the BCR-ABL and/or ERG genes in the tissue explant. In another embodiment, the method further comprises introducing the tissue explant back into the organism the tissue was derived from or into another organism under conditions suitable to modulate the expression of the BCR-ABL and/or ERG genes in that organism.

[0133] In one embodiment, the invention features a method of modulating the expression of a BCR-ABL and/or ERG gene in a subject or organism comprising: (a) synthesizing a siNA molecule of the invention, which can be chemically-modified, wherein one of the siNA strands comprises a sequence complementary to RNA of the BCR-ABL and/or ERG gene; and (b) introducing the siNA molecule into the subject or organism under conditions suitable to modulate the expression of the BCR-ABL and/or ERG gene in the subject or organism. The level of BCR-ABL and/or ERG protein or RNA can be determined using various methods well-known in the art.

[0134] In another embodiment, the invention features a method of modulating the expression of more than one BCR-ABL and/or ERG gene in a subject or organism comprising: (a) synthesizing siNA molecules of the invention, which can be chemically-modified, wherein one of the siNA strands comprises a sequence complementary to RNA of the BCR-ABL and/or ERG genes; and (b) introducing the siNA molecules into the subject or organism under conditions suitable to modulate the expression of the BCR-ABL and/or ERG genes in the subject or organism. The level of BCR-ABL and/or ERG protein or RNA can be determined as is known in the art.

[0135] In one embodiment, the invention features a method for modulating the expression of a BCR-ABL and/or ERG gene within a cell comprising: (a) synthesizing a siNA molecule of the invention, which can be chemically-modified, wherein the siNA comprises a single stranded sequence having complementarity to RNA of the BCR-ABL and/or ERG gene; and (b) introducing the siNA molecule into a cell under conditions suitable to modulate the expression of the BCR-ABL and/or ERG gene in the cell.

[0136] In another embodiment, the invention features a method for modulating the expression of more than one BCR-ABL and/or ERG gene within a cell comprising: (a) synthesizing siNA molecules of the invention, which can be chemically-modified, wherein the siNA comprises a single stranded sequence having complementarity to RNA of the BCR-ABL and/or ERG gene; and (b) contacting the cell in vitro or in vivo with the siNA molecule under conditions suitable to modulate the expression of the BCR-ABL and/or ERG genes in the cell.

[0137] In one embodiment, the invention features a method of modulating the expression of a BCR-ABL and/or ERG gene in a tissue explant comprising: (a) synthesizing a siNA molecule of the invention, which can be chemically-modified, wherein the siNA comprises a single stranded sequence having complementarity to RNA of the BCR-ABL and/or ERG gene; and (b) contacting a cell of the tissue explant derived from a particular subject or organism with the siNA molecule under conditions suitable to modulate the expression of the BCR-ABL and/or ERG gene in the tissue explant. In another embodiment, the method further comprises introducing the tissue explant back into the subject or organism the tissue was derived from or into another subject or organism under conditions suitable to modulate the expression of the BCR-ABL and/or ERG gene in that subject or organism.

[0138] In another embodiment, the invention features a method of modulating the expression of more than one BCR-ABL and/or ERG gene in a tissue explant comprising:
[0139] (a) synthesizing siNA molecules of the invention, which can be chemically-modified, wherein the siNA comprises a single stranded sequence having complementarity to RNA of the BCR-ABL and/or ERG gene; and (b) introducing the siNA molecules into a cell of the tissue explant derived from a particular subject or organism under conditions suitable to modulate the expression of the BCR-ABL and/or ERG genes in the tissue explant. In another embodiment, the method further comprises introducing the tissue explant back into the subject or organism the tissue was derived from or into another subject or organism under conditions suitable to modulate the expression of the BCR-ABL and/or ERG genes in that subject or organism.

[0140] In one embodiment, the invention features a method of modulating the expression of a BCR-ABL and/or ERG gene in a subject or organism comprising: (a) synthesizing a siNA molecule of the invention, which can be chemically-modified, wherein the siNA comprises a single stranded sequence having complementarity to RNA of the BCR-ABL and/or ERG gene; and (b) introducing the siNA molecule into the subject or organism under conditions suitable to modulate the expression of the BCR-ABL and/or ERG gene in the subject or organism.

[0141] In another embodiment, the invention features a method of modulating the expression of more than one BCR-ABL and/or ERG gene in a subject or organism comprising: (a) synthesizing siNA molecules of the invention, which can be chemically-modified, wherein the siNA comprises a single stranded sequence having complementarity to RNA of the BCR-ABL and/or ERG gene; and (b) introducing the siNA molecules into the subject or organism under conditions suitable to modulate the expression of the BCR-ABL and/or ERG genes in the subject or organism.

[0142] In one embodiment, the invention features a method of modulating the expression of a BCR-ABL and/or ERG gene in a subject or organism comprising contacting the subject or organism with a siNA molecule of the invention under conditions suitable to modulate the expression of the BCR-ABL and/or ERG gene in the subject or organism.

[0143] In one embodiment, the invention features a method for treating or preventing cancer in a subject or organism comprising contacting the subject or organism with a siNA molecule of the invention under conditions suitable to modulate the expression of the BCR-ABL and/or ERG gene in the subject or organism.

[0144] In one embodiment, the invention features a method for treating or preventing leukemia in a subject or organism comprising contacting the subject or organism with a siNA molecule of the invention under conditions suitable to modulate the expression of the BCR-ABL and/or ERG gene in the subject or organism.

[0145] In one embodiment, the invention features a method for treating or preventing acute myeloid leukemia (AML) in a subject or organism comprising contacting the subject or organism with a siNA molecule of the invention under conditions suitable to modulate the expression of the BCR-ABL and/or ERG gene in the subject or organism.

[0146] In one embodiment, the invention features a method for treating or preventing chronic myelogenous leukemia (CML) in a subject or organism comprising contacting the subject or organism with a siNA molecule of the invention under conditions suitable to modulate the expression of the BCR-ABL and/or ERG gene in the subject or organism.

[0147] In another embodiment, the invention features a method of modulating the expression of more than one BCR-ABL and/or ERG genes in a subject or organism comprising contacting the subject or organism with one or more siNA molecules of the invention under conditions suitable to modulate the expression of the BCR-ABL and/or ERG genes in the subject or organism.

[0148] The siNA molecules of the invention can be designed to down regulate or inhibit target (e.g., BCR-ABL and/or ERG) gene expression through RNAi targeting of a variety of RNA molecules. In one embodiment, the siNA molecules of the invention are used to target various RNAs corresponding to a target gene. Non-limiting examples of such RNAs include messenger RNA (mRNA), alternate RNA splice variants of target gene(s), post-transcriptionally modified RNA of target gene(s), pre-mRNA of target gene(s), and/or RNA templates. If alternate splicing produces a family of transcripts that are distinguished by usage of appropriate exons, the instant invention can be used to inhibit gene expression through the appropriate exons to specifically inhibit or to distinguish among the functions of gene family members. For example, a protein that contains an alternatively spliced transmembrane domain can be expressed in both membrane bound and secreted forms. Use of the invention to target the exon containing the transmembrane domain can be used to determine the functional consequences of pharmaceutical targeting of membrane bound as opposed to the secreted form of the protein. Non-limiting examples of applications of the invention relating to targeting these RNA molecules include therapeutic pharmaceutical applications, pharmaceutical discovery applications, molecular diagnostic and gene function applications, and gene mapping, for example using single nucleotide polymorphism mapping with siNA molecules of the invention. Such applications can be implemented using known gene sequences or from partial sequences available from an expressed sequence tag (EST).

[0149] In another embodiment, the siNA molecules of the invention are used to target conserved sequences corresponding to a gene family or gene families such as BCR-ABL and/or ERG family genes. As such, siNA molecules targeting multiple BCR-ABL and/or ERG targets can provide increased therapeutic effect. In addition, siNA can be used to characterize pathways of gene function in a variety of applications. For example, the present invention can be used to inhibit the activity of target gene(s) in a pathway to determine the function of uncharacterized gene(s) in gene function analysis, mRNA function analysis, or translational analysis. The invention can be used to determine potential target gene pathways involved in various diseases and conditions toward pharmaceutical development. The invention can be used to understand pathways of gene expression involved in, for example, cancers such as leukemias including acute myeloid leukemia and CML, lung cancer, colon cancer, breast cancer, prostate cancer, cervical cancer, lymphoma, Ewing's sarcoma and related tumors, melanoma, and angiogenic disease states such as tumor angiogenesis), diabetic retinopathy, macular degeneration, neovascular glaucoma, myopic degeneration, arthritis such as rheumatoid arthritis, psoriasis, verruca vulgaris, angiofibroma of tuberous sclerosis, port-wine stains, Sturge Weber syndrome, Kippel-Trenaunay-Weber syndrome, Osler-Weber-rendu syndrome, osteoporosis, and/or wound healing.

[0150] In one embodiment, siNA molecule(s) and/or methods of the invention are used to down regulate the expression of gene(s) that encode RNA referred to by Genbank Accession, for example, BCR-ABL and/or ERG genes encoding RNA sequence(s) referred to herein by Genbank Accession number, for example, Genbank Accession Nos. shown in Table I.

[0151] In one embodiment, the invention features a method comprising: (a) generating a library of siNA constructs having a predetermined complexity; and (b) assaying the siNA constructs of (a) above, under conditions suitable to determine RNAi target sites within the target RNA sequence. In one embodiment, the siNA molecules of (a) have strands of a fixed length, for example, about 23 nucleotides in length. In another embodiment, the siNA molecules of (a) are of differing length, for example having strands of about 15 to about 30 (e.g., about 15, 16, 17, 18, 19, 20, 21, 22, 23, 24, 25, 26, 27, 28, 29, or 30) nucleotides in length. In one embodiment, the assay can comprise a reconstituted in vitro siNA assay as described herein. In another embodiment, the assay can comprise a cell culture system in which target RNA is expressed. In another embodiment, fragments of target RNA are analyzed for detectable levels of cleavage, for example by gel electrophoresis, northern blot analysis, or RNAse protection assays, to determine the most suitable target site(s) within the target RNA sequence. The target RNA sequence can be obtained as is known in the art, for example, by cloning and/or transcription for in vitro systems, and by cellular expression in in vivo systems.

[0152] In one embodiment, the invention features a method comprising: (a) generating a randomized library of siNA constructs having a predetermined complexity, such as of 4N, where N represents the number of base paired nucleotides in each of the siNA construct strands (eg. for a siNA construct having 21 nucleotide sense and antisense strands with 19 base pairs, the complexity would be 419); and (b) assaying the siNA constructs of (a) above, under conditions suitable to determine RNAi target sites within the target BCR-ABL and/or ERG RNA sequence. In another embodiment, the siNA molecules of (a) have strands of a fixed length, for example about 23 nucleotides in length. In yet another embodiment, the siNA molecules of (a) are of differing length, for example having strands of about 15 to about 30 (e.g., about 15, 16, 17, 18, 19, 20, 21, 22, 23, 24, 25, 26, 27, 28, 29, or 30) nucleotides in length. In one embodiment, the assay can comprise a reconstituted in vitro siNA assay as described in Example 6 herein. In another embodiment, the assay can comprise a cell culture system in which target RNA is expressed. In another embodiment, fragments of BCR-ABL and/or ERG RNA are analyzed for detectable levels of cleavage, for example, by gel electrophoresis, northern blot analysis, or RNAse protection assays, to determine the most suitable target site(s) within the target BCR-ABL and/or ERG RNA sequence. The target BCR-ABL and/or ERG RNA sequence can be obtained as is known in the art, for example, by cloning and/or transcription for in vitro systems, and by cellular expression in in vivo systems.

[0153] In another embodiment, the invention features a method comprising: (a) analyzing the sequence of a RNA target encoded by a target gene; (b) synthesizing one or more sets of siNA molecules having sequence complementary to one or more regions of the RNA of (a); and (c) assaying the siNA molecules of (b) under conditions suitable to determine RNAi targets within the target RNA sequence. In one embodiment, the siNA molecules of (b) have strands of a fixed length, for example about 23 nucleotides in length. In another embodiment, the siNA molecules of (b) are of differing length, for example having strands of about 15 to about 30 (e.g., about 15, 16, 17, 18, 19, 20, 21, 22, 23, 24, 25, 26, 27, 28, 29, or 30) nucleotides in length. In one embodiment, the assay can comprise a reconstituted in vitro siNA assay as described herein. In another embodiment, the assay can comprise a cell culture system in which target RNA is expressed. Fragments of target RNA are analyzed for detectable levels of cleavage, for example by gel electrophoresis, northern blot analysis, or RNAse protection assays, to determine the most suitable target site(s) within the target RNA sequence. The target RNA sequence can be obtained as is known in the art, for example, by cloning and/or transcription for in vitro systems, and by expression in in vivo systems.

[0154] By “target site” is meant a sequence within a target RNA that is “targeted” for cleavage mediated by a siNA construct which contains sequences within its antisense region that are complementary to the target sequence.

[0155] By “detectable level of cleavage” is meant cleavage of target RNA (and formation of cleaved product RNAs) to an extent sufficient to discern cleavage products above the background of RNAs produced by random degradation of the target RNA. Production of cleavage products from 1-5% of the target RNA is sufficient to detect above the background for most methods of detection.

[0156] In one embodiment, the invention features a composition comprising a siNA molecule of the invention, which can be chemically-modified, in a pharmaceutically acceptable carrier or diluent. In another embodiment, the invention features a pharmaceutical composition comprising siNA molecules of the invention, which can be chemically-modified, targeting one or more genes in a pharmaceutically acceptable carrier or diluent. In another embodiment, the invention features a method for diagnosing a disease or condition in a subject comprising administering to the subject a composition of the invention under conditions suitable for the diagnosis of the disease or condition in the subject. In another embodiment, the invention features a method for treating or preventing a disease or condition in a subject, comprising administering to the subject a composition of the invention under conditions suitable for the treatment or prevention of the disease or condition in the subject, alone or in conjunction with one or more other therapeutic compounds. In yet another embodiment, the invention features a method for treating or preventing cancers of the lung, colon, breast, prostate, cervix, lymphoma, Ewing's sarcoma and related tumors, melanoma, angiogenic disease states such as tumor angiogenesis, diabetic retinopathy, macular degeneration, neovascular glaucoma, myopic degeneration, arthritis such as rheumatoid arthritis, psoriasis, verruca vulgaris, angiofibroma of tuberous sclerosis, port-wine stains, Sturge Weber syndrome, Kippel-Trenaunay-Weber syndrome, Osler-Weber-rendu syndrome, leukemias such as acute myeloid leukemia and CML, osteoporosis, and wound healing in a subject comprising administering to the subject a composition of the invention under conditions suitable for the treatment or prevention of cancers of the lung, colon, breast, prostate, cervix, lymphoma, Ewing's sarcoma and related tumors, melanoma, angiogenic disease states such as tumor angiogenesis, diabetic retinopathy, macular degeneration, neovascular glaucoma, myopic degeneration, arthritis such as rheumatoid arthritis, psoriasis, verruca vulgaris, angiofibroma of tuberous sclerosis, port-wine stains, Sturge Weber syndrome, Kippel-Trenaunay-Weber syndrome, Osler-Weber-rendu syndrome, leukemias such as acute myeloid leukemia and CML, osteoporosis, and wound healing in the subject.

[0157] In another embodiment, the invention features a method for validating a BCR-ABL and/or ERG gene target, comprising: (a) synthesizing a siNA molecule of the invention, which can be chemically-modified, wherein one of the siNA strands includes a sequence complementary to RNA of a BCR-ABL and/or ERG target gene; (b) introducing the siNA molecule into a cell, tissue, subject, or organism under conditions suitable for modulating expression of the BCR-ABL and/or ERG target gene in the cell, tissue, subject, or organism; and (c) determining the function of the gene by assaying for any phenotypic change in the cell, tissue, subject, or organism.

[0158] In another embodiment, the invention features a method for validating a BCR-ABL and/or ERG target comprising: (a) synthesizing a siNA molecule of the invention, which can be chemically-modified, wherein one of the siNA strands includes a sequence complementary to RNA of a BCR-ABL and/or ERG target gene; (b) introducing the siNA molecule into a biological system under conditions suitable for modulating expression of the BCR-ABL and/or ERG target gene in the biological system; and (c) determining the function of the gene by assaying for any phenotypic change in the biological system.

[0159] By “biological system” is meant, material, in a purified or unpurified form, from biological sources, including but not limited to human or animal, wherein the system comprises the components required for RNAi activity. The term “biological system” includes, for example, a cell, tissue, subject, or organism, or extract thereof. The term biological system also includes reconstituted RNAi systems that can be used in an in vitro setting.

[0160] By “phenotypic change” is meant any detectable change to a cell that occurs in response to contact or treatment with a nucleic acid molecule of the invention (e.g., siNA). Such detectable changes include, but are not limited to, changes in shape, size, proliferation, motility, protein expression or RNA expression or other physical or chemical changes as can be assayed by methods known in the art. The detectable change can also include expression of reporter genes/molecules such as Green Florescent Protein (GFP) or various tags that are used to identify an expressed protein or any other cellular component that can be assayed.

[0161] In one embodiment, the invention features a kit containing a siNA molecule of the invention, which can be chemically-modified, that can be used to modulate the expression of a BCR-ABL and/or ERG target gene in a biological system, including, for example, in a cell, tissue, subject, or organism. In another embodiment, the invention features a kit containing more than one siNA molecule of the invention, which can be chemically-modified, that can be used to modulate the expression of more than one BCR-ABL and/or ERG target gene in a biological system, including, for example, in a cell, tissue, subject, or organism.

[0162] In one embodiment, the invention features a cell containing one or more siNA molecules of the invention, which can be chemically-modified. In another embodiment, the cell containing a siNA molecule of the invention is a mammalian cell. In yet another embodiment, the cell containing a siNA molecule of the invention is a human cell.

[0163] In one embodiment, the synthesis of a siNA molecule of the invention, which can be chemically-modified, comprises: (a) synthesis of two complementary strands of the siNA molecule; (b) annealing the two complementary strands together under conditions suitable to obtain a double-stranded siNA molecule. In another embodiment, synthesis of the two complementary strands of the siNA molecule is by solid phase oligonucleotide synthesis. In yet another embodiment, synthesis of the two complementary strands of the siNA molecule is by solid phase tandem oligonucleotide synthesis.

[0164] In one embodiment, the invention features a method for synthesizing a siNA duplex molecule comprising: (a) synthesizing a first oligonucleotide sequence strand of the siNA molecule, wherein the first oligonucleotide sequence strand comprises a cleavable linker molecule that can be used as a scaffold for the synthesis of the second oligonucleotide sequence strand of the siNA; (b) synthesizing the second oligonucleotide sequence strand of siNA on the scaffold of the first oligonucleotide sequence strand, wherein the second oligonucleotide sequence strand further comprises a chemical moiety than can be used to purify the siNA duplex; (c) cleaving the linker molecule of (a) under conditions suitable for the two siNA oligonucleotide strands to hybridize and form a stable duplex; and (d) purifying the siNA duplex utilizing the chemical moiety of the second oligonucleotide sequence strand. In one embodiment, cleavage of the linker molecule in (c) above takes place during deprotection of the oligonucleotide, for example, under hydrolysis conditions using an alkylamine base such as methylamine. In one embodiment, the method of synthesis comprises solid phase synthesis on a solid support such as controlled pore glass (CPG) or polystyrene, wherein the first sequence of (a) is synthesized on a cleavable linker, such as a succinyl linker, using the solid support as a scaffold. The cleavable linker in (a) used as a scaffold for synthesizing the second strand can comprise similar reactivity as the solid support derivatized linker, such that cleavage of the solid support derivatized linker and the cleavable linker of (a) takes place concomitantly. In another embodiment, the chemical moiety of (b) that can be used to isolate the attached oligonucleotide sequence comprises a trityl group, for example a dimethoxytrityl group, which can be employed in a trityl-on synthesis strategy as described herein. In yet another embodiment, the chemical moiety, such as a dimethoxytrityl group, is removed during purification, for example, using acidic conditions.

[0165] In a further embodiment, the method for siNA synthesis is a solution phase synthesis or hybrid phase synthesis wherein both strands of the siNA duplex are synthesized in tandem using a cleavable linker attached to the first sequence which acts a scaffold for synthesis of the second sequence. Cleavage of the linker under conditions suitable for hybridization of the separate siNA sequence strands results in formation of the double-stranded siNA molecule.

[0166] In another embodiment, the invention features a method for synthesizing a siNA duplex molecule comprising: (a) synthesizing one oligonucleotide sequence strand of the siNA molecule, wherein the sequence comprises a cleavable linker molecule that can be used as a scaffold for the synthesis of another oligonucleotide sequence; (b) synthesizing a second oligonucleotide sequence having complementarity to the first sequence strand on the scaffold of (a), wherein the second sequence comprises the other strand of the double-stranded siNA molecule and wherein the second sequence further comprises a chemical moiety than can be used to isolate the attached oligonucleotide sequence; (c) purifying the product of (b) utilizing the chemical moiety of the second oligonucleotide sequence strand under conditions suitable for isolating the full-length sequence comprising both siNA oligonucleotide strands connected by the cleavable linker and under conditions suitable for the two siNA oligonucleotide strands to hybridize and form a stable duplex. In one embodiment, cleavage of the linker molecule in (c) above takes place during deprotection of the oligonucleotide, for example, under hydrolysis conditions. In another embodiment, cleavage of the linker molecule in (c) above takes place after deprotection of the oligonucleotide. In another embodiment, the method of synthesis comprises solid phase synthesis on a solid support such as controlled pore glass (CPG) or polystyrene, wherein the first sequence of (a) is synthesized on a cleavable linker, such as a succinyl linker, using the solid support as a scaffold. The cleavable linker in (a) used as a scaffold for synthesizing the second strand can comprise similar reactivity or differing reactivity as the solid support derivatized linker, such that cleavage of the solid support derivatized linker and the cleavable linker of (a) takes place either concomitantly or sequentially. In one embodiment, the chemical moiety of (b) that can be used to isolate the attached oligonucleotide sequence comprises a trityl group, for example a dimethoxytrityl group.

[0167] In another embodiment, the invention features a method for making a double-stranded siNA molecule in a single synthetic process comprising: (a) synthesizing an oligonucleotide having a first and a second sequence, wherein the first sequence is complementary to the second sequence, and the first oligonucleotide sequence is linked to the second sequence via a cleavable linker, and wherein a terminal 5′-protecting group, for example, a 5′-O-dimethoxytrityl group (5′-O-DMT) remains on the oligonucleotide having the second sequence; (b) deprotecting the oligonucleotide whereby the deprotection results in the cleavage of the linker joining the two oligonucleotide sequences; and (c) purifying the product of (b) under conditions suitable for isolating the double-stranded siNA molecule, for example using a trityl-on synthesis strategy as described herein.

[0168] In another embodiment, the method of synthesis of siNA molecules of the invention comprises the teachings of Scaringe et al., U.S. Pat. Nos. 5,889,136; 6,008,400; and 6,111,086, incorporated by reference herein in their entirety.

[0169] In one embodiment, the invention features siNA constructs that mediate RNAi against BCR-ABL and/or ERG, wherein the siNA construct comprises one or more chemical modifications, for example, one or more chemical modifications having any of Formulae I-VII or any combination thereof that increases the nuclease resistance of the siNA construct.

[0170] In another embodiment, the invention features a method for generating siNA molecules with increased nuclease resistance comprising (a) introducing nucleotides having any of Formula I-VII or any combination thereof into a siNA molecule, and (b) assaying the siNA molecule of step (a) under conditions suitable for isolating siNA molecules having increased nuclease resistance.

[0171] In another embodiment, the invention features a method for generating siNA molecules with improved toxicologic profiles (e.g., have attenuated or no immunstimulatory properties) comprising (a) introducing nucleotides having any of Formula I-VII (e.g., siNA motifs referred to in Table 1) or any combination thereof into a siNA molecule, and (b) assaying the siNA molecule of step (a) under conditions suitable for isolating siNA molecules having improved toxicologic profiles.

[0172] In another embodiment, the invention features a method for generating siNA molecules that do not stimulate an interferon response (e.g., no interferon response or attenuated interferon response) in a cell, subject, or organism, comprising (a) introducing nucleotides having any of Formula I-VII (e.g., siNA motifs referred to in Table 1) or any combination thereof into a siNA molecule, and (b) assaying the siNA molecule of step (a) under conditions suitable for isolating siNA molecules that do not stimulate an interferon response.

[0173] By “improved toxicologic profile”, is meant that the chemically modified siNA construct exhibits decreased toxicity in a cell, subject, or organism compared to an unmodified siNA or siNA molecule hving fewer modifications or modifications that are less effective in imparting improved toxicology. In a non-limiting example, siNA molecules with improved toxicologic profiles are associated with a decreased or attenuated immunostimulatory response in a cell, subject, or organism compared to an unmodified siNA or siNA molecule having fewer modifications or modifications that are less effective in imparting improved toxicology. In one embodiment, a siNA molecule with an improved toxicological profile comprises no ribonucleotides. In one embodiment, a siNA molecule with an improved toxicological profile comprises less than 5 ribonucleotides (e.g., 1, 2, 3, or 4 ribonucleotides). In one embodiment, a siNA molecule with an improved toxicological profile comprises Stab 7, Stab 8, Stab 11, Stab 12, Stab 13, Stab 16, Stab 17, Stab 18, Stab 19, Stab 20, Stab 23, Stab 24, Stab 25, Stab 26, Stab 27, Stab 28, Stab 29, Stab 30, Stab 31, Stab 32 or any combination thereof (see Table IV). In one embodiment, the level of immunostimulatory response associated with a given siNA molecule can be measured as is known in the art, for example by determining the level of PKR/interferon response, proliferation, B-cell activation, and/or cytokine production in assays to quantitate the immunostimulatory response of particular siNA molecules (see, for example, Leifer et al., 2003, J Immunother. 26, 313-9; and U.S. Pat. No. 5,968,909, incorporated in its entirety by reference).

[0174] In one embodiment, the invention features siNA constructs that mediate RNAi against BCR-ABL and/or ERG, wherein the siNA construct comprises one or more chemical modifications described herein that modulates the binding affinity between the sense and antisense strands of the siNA construct.

[0175] In another embodiment, the invention features a method for generating siNA molecules with increased binding affinity between the sense and antisense strands of the siNA molecule comprising (a) introducing nucleotides having any of Formula I-VII or any combination thereof into a siNA molecule, and (b) assaying the siNA molecule of step (a) under conditions suitable for isolating siNA molecules having increased binding affinity between the sense and antisense strands of the siNA molecule.

[0176] In one embodiment, the invention features siNA constructs that mediate RNAi against BCR-ABL and/or ERG, wherein the siNA construct comprises one or more chemical modifications described herein that modulates the binding affinity between the antisense strand of the siNA construct and a complementary target RNA sequence within a cell.

[0177] In one embodiment, the invention features siNA constructs that mediate RNAi against BCR-ABL and/or ERG, wherein the siNA construct comprises one or more chemical modifications described herein that modulates the binding affinity between the antisense strand of the siNA construct and a complementary target DNA sequence within a cell.

[0178] In another embodiment, the invention features a method for generating siNA molecules with increased binding affinity between the antisense strand of the siNA molecule and a complementary target RNA sequence comprising (a) introducing nucleotides having any of Formula I-VII or any combination thereof into a siNA molecule, and (b) assaying the siNA molecule of step (a) under conditions suitable for isolating siNA molecules having increased binding affinity between the antisense strand of the siNA molecule and a complementary target RNA sequence.

[0179] In another embodiment, the invention features a method for generating siNA molecules with increased binding affinity between the antisense strand of the siNA molecule and a complementary target DNA sequence comprising (a) introducing nucleotides having any of Formula I-VII or any combination thereof into a siNA molecule, and (b) assaying the siNA molecule of step (a) under conditions suitable for isolating siNA molecules having increased binding affinity between the antisense strand of the siNA molecule and a complementary target DNA sequence.

[0180] In one embodiment, the invention features siNA constructs that mediate RNAi against BCR-ABL and/or ERG, wherein the siNA construct comprises one or more chemical modifications described herein that modulate the polymerase activity of a cellular polymerase capable of generating additional endogenous siNA molecules having sequence homology to the chemically-modified siNA construct.

[0181] In another embodiment, the invention features a method for generating siNA molecules capable of mediating increased polymerase activity of a cellular polymerase capable of generating additional endogenous siNA molecules having sequence homology to a chemically-modified siNA molecule comprising (a) introducing nucleotides having any of Formula I-VII or any combination thereof into a siNA molecule, and (b) assaying the siNA molecule of step (a) under conditions suitable for isolating siNA molecules capable of mediating increased polymerase activity of a cellular polymerase capable of generating additional endogenous siNA molecules having sequence homology to the chemically-modified siNA molecule.

[0182] In one embodiment, the invention features chemically-modified siNA constructs that mediate RNAi against BCR-ABL and/or ERG in a cell, wherein the chemical modifications do not significantly effect the interaction of siNA with a target RNA molecule, DNA molecule and/or proteins or other factors that are essential for RNAi in a manner that would decrease the efficacy of RNAi mediated by such siNA constructs.

[0183] In another embodiment, the invention features a method for generating siNA molecules with improved RNAi activity against BCR-ABL and/or ERG comprising (a) introducing nucleotides having any of Formula I-VII or any combination thereof into a siNA molecule, and (b) assaying the siNA molecule of step (a) under conditions suitable for isolating siNA molecules having improved RNAi activity.

[0184] In yet another embodiment, the invention features a method for generating siNA molecules with improved RNAi activity against BCR-ABL and/or ERG target RNA comprising (a) introducing nucleotides having any of Formula I-VII or any combination thereof into a siNA molecule, and (b) assaying the siNA molecule of step (a) under conditions suitable for isolating siNA molecules having improved RNAi activity against the target RNA.

[0185] In yet another embodiment, the invention features a method for generating siNA molecules with improved RNAi activity against BCR-ABL and/or ERG target DNA comprising (a) introducing nucleotides having any of Formula I-VII or any combination thereof into a siNA molecule, and (b) assaying the siNA molecule of step (a) under conditions suitable for isolating siNA molecules having improved RNAi activity against the target DNA.

[0186] In one embodiment, the invention features siNA constructs that mediate RNAi against BCR-ABL and/or ERG, wherein the siNA construct comprises one or more chemical modifications described herein that modulates the cellular uptake of the siNA construct.

[0187] In another embodiment, the invention features a method for generating siNA molecules against BCR-ABL and/or ERG with improved cellular uptake comprising (a) introducing nucleotides having any of Formula I-VII or any combination thereof into a siNA molecule, and (b) assaying the siNA molecule of step (a) under conditions suitable for isolating siNA molecules having improved cellular uptake.

[0188] In one embodiment, the invention features siNA constructs that mediate RNAi against BCR-ABL and/or ERG, wherein the siNA construct comprises one or more chemical modifications described herein that increases the bioavailability of the siNA construct, for example, by attaching polymeric conjugates such as polyethyleneglycol or equivalent conjugates that improve the pharmacokinetics of the siNA construct, or by attaching conjugates that target specific tissue types or cell types in vivo. Non-limiting examples of such conjugates are described in Vargeese et al., U.S. Ser. No. 10/201,394 incorporated by reference herein.

[0189] In one embodiment, the invention features a method for generating siNA molecules of the invention with improved bioavailability comprising (a) introducing a conjugate into the structure of a siNA molecule, and (b) assaying the siNA molecule of step (a) under conditions suitable for isolating siNA molecules having improved bioavailability. Such conjugates can include ligands for cellular receptors, such as peptides derived from naturally occurring protein ligands; protein localization sequences, including cellular ZIP code sequences; antibodies; nucleic acid aptamers; vitamins and other co-factors, such as folate and N-acetylgalactosamine; polymers, such as polyethyleneglycol (PEG); phospholipids; cholesterol; polyamines, such as spermine or spermidine; and others.

[0190] In one embodiment, the invention features a double stranded short interfering nucleic acid (siNA) molecule that comprises a first nucleotide sequence complementary to a target RNA sequence or a portion thereof, and a second sequence having complementarity to said first sequence, wherein said second sequence is chemically modified in a manner that it can no longer act as a guide sequence for efficiently mediating RNA interference and/or be recognized by cellular proteins that facilitate RNAi.

[0191] In one embodiment, the invention features a double stranded short interfering nucleic acid (siNA) molecule that comprises a first nucleotide sequence complementary to a target RNA sequence or a portion thereof, and a second sequence having complementarity to said first sequence, wherein the second sequence is designed or modified in a manner that prevents its entry into the RNAi pathway as a guide sequence or as a sequence that is complementary to a target nucleic acid (e.g., RNA) sequence. Such design or modifications are expected to enhance the activity of siNA and/or improve the specificity of siNA molecules of the invention. These modifications are also expected to minimize any off-target effects and/or associated toxicity.

[0192] In one embodiment, the invention features a double stranded short interfering nucleic acid (siNA) molecule that comprises a first nucleotide sequence complementary to a target RNA sequence or a portion thereof, and a second sequence having complementarity to said first sequence, wherein said second sequence is incapable of acting as a guide sequence for mediating RNA interference.

[0193] In one embodiment, the invention features a double stranded short interfering nucleic acid (siNA) molecule that comprises a first nucleotide sequence complementary to a target RNA sequence or a portion thereof, and a second sequence having complementarity to said first sequence, wherein said second sequence does not have a terminal 5′-hydroxyl (5′-OH) or 5′-phosphate group.

[0194] In one embodiment, the invention features a double stranded short interfering nucleic acid (siNA) molecule that comprises a first nucleotide sequence complementary to a target RNA sequence or a portion thereof, and a second sequence having complementarity to said first sequence, wherein said second sequence comprises a terminal cap moiety at the 5′-end of said second sequence. In one embodiment, the terminal cap moiety comprises an inverted abasic, inverted deoxy abasic, inverted nucleotide moiety, a group shown in FIG. 10, an alkyl or cycloalkyl group, a heterocycle, or any other group that prevents RNAi activity in which the second sequence serves as a guide sequence or template for RNAi.

[0195] In one embodiment, the invention features a double stranded short interfering nucleic acid (siNA) molecule that comprises a first nucleotide sequence complementary to a target RNA sequence or a portion thereof, and a second sequence having complementarity to said first sequence, wherein said second sequence comprises a terminal cap moiety at the 5′-end and 3′-end of said second sequence. In one embodiment, each terminal cap moiety individually comprises an inverted abasic, inverted deoxy abasic, inverted nucleotide moiety, a group shown in FIG. 10, an alkyl or cycloalkyl group, a heterocycle, or any other group that prevents RNAi activity in which the second sequence serves as a guide sequence or template for RNAi.

[0196] In one embodiment, the invention features a method for generating siNA molecules of the invention with improved specificity for down regulating or inhibiting the expression of a target nucleic acid (e.g., a DNA or RNA such as a gene or its corresponding RNA), comprising (a) introducing one or more chemical modifications into the structure of a siNA molecule, and (b) assaying the siNA molecule of step (a) under conditions suitable for isolating siNA molecules having improved specificity. In another embodiment, the chemical modification used to improve specificity comprises terminal cap modifications at the 5′-end, 3′-end, or both 5′ and 3′-ends of the siNA molecule. The terminal cap modifications can comprise, for example, structures shown in FIG. 10 (e.g. inverted deoxyabasic moieties) or any other chemical modification that renders a portion of the siNA molecule (e.g. the sense strand) incapable of mediating RNA interference against an off target nucleic acid sequence. In a non-limiting example, a siNA molecule is designed such that only the antisense sequence of the siNA molecule can serve as a guide sequence for RISC mediated degradation of a corresponding target RNA sequence. This can be accomplished by rendering the sense sequence of the siNA inactive by introducing chemical modifications to the sense strand that preclude recognition of the sense strand as a guide sequence by RNAi machinery. In one embodiment, such chemical modifications comprise any chemical group at the 5′-end of the sense strand of the siNA, or any other group that serves to render the sense strand inactive as a guide sequence for mediating RNA interference. These modifications, for example, can result in a molecule where the 5′-end of the sense strand no longer has a free 5′-hydroxyl (5′-OH) or a free 5′-phosphate group (e.g., phosphate, diphosphate, triphosphate, cyclic phosphate etc.). Non-limiting examples of such siNA constructs are described herein, such as “Stab 9/10”, “Stab 7/8”, “Stab 7/19”, “Stab 17/22”, “Stab 23/24”, “Stab 24/25”, and “Stab 24/26” chemistries and variants thereof (see Table IV) wherein the 5′-end and 3′-end of the sense strand of the siNA do not comprise a hydroxyl group or phosphate group.

[0197] In one embodiment, the invention features a method for generating siNA molecules of the invention with improved specificity for down regulating or inhibiting the expression of a target nucleic acid (e.g., a DNA or RNA such as a gene or its corresponding RNA), comprising introducing one or more chemical modifications into the structure of a siNA molecule that prevent a strand or portion of the siNA molecule from acting as a template or guide sequence for RNAi activity. In one embodiment, the inactive strand or sense region of the siNA molecule is the sense strand or sense region of the siNA molecule, i.e. the strand or region of the siNA that does not have complementarity to the target nucleic acid sequence. In one embodiment, such chemical modifications comprise any chemical group at the 5′-end of the sense strand or region of the siNA that does not comprise a 5′-hydroxyl (5′-OH) or 5′-phosphate group, or any other group that serves to render the sense strand or sense region inactive as a guide sequence for mediating RNA interference. Non-limiting examples of such siNA constructs are described herein, such as “Stab 9/10”, “Stab 7/8”, “Stab 7/19”, “Stab 17/22”, “Stab 23/24”, “Stab 24/25”, and “Stab 24/26” chemistries and variants thereof (see Table IV) wherein the 5′-end and 3′-end of the sense strand of the siNA do not comprise a hydroxyl group or phosphate group.

[0198] In one embodiment, the invention features a method for screening siNA molecules that are active in mediating RNA interference against a target nucleic acid sequence comprising (a) generating a plurality of unmodified siNA molecules, (b) screening the siNA molecules of step (a) under conditions suitable for isolating siNA molecules that are active in mediating RNA interference against the target nucleic acid sequence, and (c) introducing chemical modifications (e.g. chemical modifications as described herein or as otherwise known in the art) into the active siNA molecules of (b). In one embodiment, the method further comprises re-screening the chemically modified siNA molecules of step (c) under conditions suitable for isolating chemically modified siNA molecules that are active in mediating RNA interference against the target nucleic acid sequence.

[0199] In one embodiment, the invention features a method for screening chemically modified siNA molecules that are active in mediating RNA interference against a target nucleic acid sequence comprising (a) generating a plurality of chemically modified siNA molecules (e.g. siNA molecules as described herein or as otherwise known in the art), and (b) screening the siNA molecules of step (a) under conditions suitable for isolating chemically modified siNA molecules that are active in mediating RNA interference against the target nucleic acid sequence.

[0200] The term “ligand” refers to any compound or molecule, such as a drug, peptide, hormone, or neurotransmitter, that is capable of interacting with another compound, such as a receptor, either directly or indirectly. The receptor that interacts with a ligand can be present on the surface of a cell or can alternately be an intercullular receptor. Interaction of the ligand with the receptor can result in a biochemical reaction, or can simply be a physical interaction or association.

[0201] In another embodiment, the invention features a method for generating siNA molecules of the invention with improved bioavailability comprising (a) introducing an excipient formulation to a siNA molecule, and (b) assaying the siNA molecule of step (a) under conditions suitable for isolating siNA molecules having improved bioavailability. Such excipients include polymers such as cyclodextrins, lipids, cationic lipids, polyamines, phospholipids, nanoparticles, receptors, ligands, and others.

[0202] In another embodiment, the invention features a method for generating siNA molecules of the invention with improved bioavailability comprising (a) introducing nucleotides having any of Formulae I-VII or any combination thereof into a siNA molecule, and (b) assaying the siNA molecule of step (a) under conditions suitable for isolating siNA molecules having improved bioavailability.

[0203] In another embodiment, polyethylene glycol (PEG) can be covalently attached to siNA compounds of the present invention. The attached PEG can be any molecular weight, preferably from about 2,000 to about 50,000 daltons (Da).

[0204] The present invention can be used alone or as a component of a kit having at least one of the reagents necessary to carry out the in vitro or in vivo introduction of RNA to test samples and/or subjects. For example, preferred components of the kit include a siNA molecule of the invention and a vehicle that promotes introduction of the siNA into cells of interest as described herein (e.g., using lipids and other methods of transfection known in the art, see for example Beigelman et al, U.S. Pat. No. 6,395,713). The kit can be used for target validation, such as in determining gene function and/or activity, or in drug optimization, and in drug discovery (see for example Usman et al., U.S. Ser. No. 60/402,996). Such a kit can also include instructions to allow a user of the kit to practice the invention.

[0205] The term “short interfering nucleic acid”, “sINA”, “short interfering RNA”, “siRNA”, “short interfering nucleic acid molecule”, “short interfering oligonucleotide molecule”, or “chemically-modified short interfering nucleic acid molecule” as used herein refers to any nucleic acid molecule capable of inhibiting or down regulating gene expression or viral replication, for example by mediating RNA interference “RNAi” or gene silencing in a sequence-specific manner; see for example Zamore et al., 2000, Cell, 101, 25-33; Bass, 2001, Nature, 411, 428429; Elbashir et al., 2001, Nature, 411, 494-498; and Kreutzer et al., International PCT Publication No. WO 00/44895; Zernicka-Goetz et al., International PCT Publication No. WO 01/36646; Fire, International PCT Publication No. WO 99/32619; Plaetinck et al., International PCT Publication No. WO 00/01846; Mello and Fire, International PCT Publication No. WO 01/29058; Deschamps-Depaillette, International PCT Publication No. WO 99/07409; and Li et al., International PCT Publication No. WO 00/44914; Allshire, 2002, Science, 297, 1818-1819; Volpe et al., 2002, Science, 297, 1833-1837; Jenuwein, 2002, Science, 297, 2215-2218; and Hall et al., 2002, Science, 297, 2232-2237; Hutvagner and Zamore, 2002, Science, 297, 2056-60; McManus et al., 2002, RNA, 8, 842-850; Reinhart et al., 2002, Gene & Dev., 16, 1616-1626; and Reinhart & Bartel, 2002, Science, 297, 1831). Non limiting examples of siNA molecules of the invention are shown in FIGS. 4-6, and Tables II and III herein. For example the siNA can be a double-stranded polynucleotide molecule comprising self-complementary sense and antisense regions, wherein the antisense region comprises nucleotide sequence that is complementary to nucleotide sequence in a target nucleic acid molecule or a portion thereof and the sense region having nucleotide sequence corresponding to the target nucleic acid sequence or a portion thereof. The siNA can be assembled from two separate oligonucleotides, where one strand is the sense strand and the other is the antisense strand, wherein the antisense and sense strands are self-complementary (i.e. each strand comprises nucleotide sequence that is complementary to nucleotide sequence in the other strand; such as where the antisense strand and sense strand form a duplex or double stranded structure, for example wherein the double stranded region is about 15 to about 30, e.g., about 15, 16, 17, 18, 19, 20, 21, 22, 23, 24, 25, 26, 27, 28, 29 or 30 base pairs; the antisense strand comprises nucleotide sequence that is complementary to nucleotide sequence in a target nucleic acid molecule or a portion thereof and the sense strand comprises nucleotide sequence corresponding to the target nucleic acid sequence or a portion thereof (e.g., about 15 to about 25 or more nucleotides of the siNA molecule are complementary to the target nucleic acid or a portion thereof). Alternatively, the siNA is assembled from a single oligonucleotide, where the self-complementary sense and antisense regions of the siNA are linked by means of a nucleic acid based or non-nucleic acid-based linker(s). The siNA can be a polynucleotide with a duplex, asymmetric duplex, hairpin or asymmetric hairpin secondary structure, having self-complementary sense and antisense regions, wherein the antisense region comprises nucleotide sequence that is complementary to nucleotide sequence in a separate target nucleic acid molecule or a portion thereof and the sense region having nucleotide sequence corresponding to the target nucleic acid sequence or a portion thereof. The siNA can be a circular single-stranded polynucleotide having two or more loop structures and a stem comprising self-complementary sense and antisense regions, wherein the antisense region comprises nucleotide sequence that is complementary to nucleotide sequence in a target nucleic acid molecule or a portion thereof and the sense region having nucleotide sequence corresponding to the target nucleic acid sequence or a portion thereof, and wherein the circular polynucleotide can be processed either in vivo or in vitro to generate an active siNA molecule capable of mediating RNAi. The siNA can also comprise a single stranded polynucleotide having nucleotide sequence complementary to nucleotide sequence in a target nucleic acid molecule or a portion thereof (for example, where such siNA molecule does not require the presence within the siNA molecule of nucleotide sequence corresponding to the target nucleic acid sequence or a portion thereof), wherein the single stranded polynucleotide can further comprise a terminal phosphate group, such as a 5′-phosphate (see for example Martinez et al., 2002, Cell., 110, 563-574 and Schwarz et al., 2002, Molecular Cell, 10, 537-568), or 5′,3′-diphosphate. In certain embodiments, the siNA molecule of the invention comprises separate sense and antisense sequences or regions, wherein the sense and antisense regions are covalently linked by nucleotide or non-nucleotide linkers molecules as is known in the art, or are alternately non-covalently linked by ionic interactions, hydrogen bonding, van der waals interactions, hydrophobic interactions, and/or stacking interactions. In certain embodiments, the siNA molecules of the invention comprise nucleotide sequence that is complementary to nucleotide sequence of a target gene. In another embodiment, the siNA molecule of the invention interacts with nucleotide sequence of a target gene in a manner that causes inhibition of expression of the target gene. As used herein, siNA molecules need not be limited to those molecules containing only RNA, but further encompasses chemically-modified nucleotides and non-nucleotides. In certain embodiments, the short interfering nucleic acid molecules of the invention lack 2′-hydroxy (2′-OH) containing nucleotides. Applicant describes in certain embodiments short interfering nucleic acids that do not require the presence of nucleotides having a 2′-hydroxy group for mediating RNAi and as such, short interfering nucleic acid molecules of the invention optionally do not include any ribonucleotides (e.g., nucleotides having a 2′-OH group). Such siNA molecules that do not require the presence of ribonucleotides within the siNA molecule to support RNAi can however have an attached linker or linkers or other attached or associated groups, moieties, or chains containing one or more nucleotides with 2′-OH groups. Optionally, siNA molecules can comprise ribonucleotides at about 5, 10, 20, 30, 40, or 50% of the nucleotide positions. The modified short interfering nucleic acid molecules of the invention can also be referred to as short interfering modified oligonucleotides “siMON.” As used herein, the term siNA is meant to be equivalent to other terms used to describe nucleic acid molecules that are capable of mediating sequence specific RNAi, for example short interfering RNA (siRNA), double-stranded RNA (dsRNA), micro-RNA (mRNA), short hairpin RNA (shRNA), short interfering oligonucleotide, short interfering nucleic acid, short interfering modified oligonucleotide, chemically-modified siRNA, post-transcriptional gene silencing RNA (ptgsRNA), and others. In addition, as used herein, the term RNAi is meant to be equivalent to other terms used to describe sequence specific RNA interference, such as post transcriptional gene silencing, translational inhibition, or epigenetics. For example, siNA molecules of the invention can be used to epigenetically silence genes at both the post-transcriptional level or the pre-transcriptional level. In a non-limiting example, epigenetic regulation of gene expression by siNA molecules of the invention can result from siNA mediated modification of chromatin structure or methylation pattern to alter gene expression (see, for example, Verdel et al., 2004, Science, 303, 672-676; Pal-Bhadra et al., 2004, Science, 303, 669-672; Allshire, 2002, Science, 297, 1818-1819; Volpe et al., 2002, Science, 297, 1833-1837; Jenuwein, 2002, Science, 297, 2215-2218; and Hall et al., 2002, Science, 297, 2232-2237).

[0206] In one embodiment, a siNA molecule of the invention is a duplex forming oligonucleotide “DFO”, (see for example FIGS. 14-15 and Vaish et al., U.S. Ser. No. 10/727,780 filed Dec. 3, 2003 and International PCT Application No. US04/16390, filed May 24, 2004).

[0207] In one embodiment, a siNA molecule of the invention is a multifunctional siNA, (see for example FIGS. 16-21 and Jadhav et al., U.S. Ser. No. 60/543,480 filed Feb. 10, 2004 and International PCT Application No. US04/16390, filed May 24, 2004). The multifunctional siNA of the invention can comprise sequence targeting, for example, two regions of BCR-ABL and/or ERG RNA (see for example target sequences in Tables II and III).

[0208] By “asymmetric hairpin” as used herein is meant a linear siNA molecule comprising an antisense region, a loop portion that can comprise nucleotides or non-nucleotides, and a sense region that comprises fewer nucleotides than the antisense region to the extent that the sense region has enough complementary nucleotides to base pair with the antisense region and form a duplex with loop. For example, an asymmetric hairpin siNA molecule of the invention can comprise an antisense region having length sufficient to mediate RNAi in a cell or in vitro system (e.g. about 15 to about 30, or about 15, 16, 17, 18, 19, 20, 21, 22, 23, 24, 25, 26, 27, 28, 29, or 30 nucleotides) and a loop region comprising about 4 to about 12 (e.g., about 4, 5, 6, 7, 8, 9, 10, 11, or 12) nucleotides, and a sense region having about 3 to about 25 (e.g., about 3, 4, 5, 6, 7, 8, 9, 10, 11, 12, 13, 14, 15, 16, 17, 18, 19, 20, 21, 22, 23, 24, or 25) nucleotides that are complementary to the antisense region. The asymmetric hairpin siNA molecule can also comprise a 5′-terminal phosphate group that can be chemically modified. The loop portion of the asymmetric hairpin siNA molecule can comprise nucleotides, non-nucleotides, linker molecules, or conjugate molecules as described herein.

[0209] By “asymmetric duplex” as used herein is meant a siNA molecule having two separate strands comprising a sense region and an antisense region, wherein the sense region comprises fewer nucleotides than the antisense region to the extent that the sense region has enough complementary nucleotides to base pair with the antisense region and form a duplex. For example, an asymmetric duplex siNA molecule of the invention can comprise an antisense region having length sufficient to mediate RNAi in a cell or in vitro system (e.g. about 15 to about 30, or about 15, 16, 17, 18, 19, 20, 21, 22, 23, 24, 25, 26, 27, 28, 29, or 30 nucleotides) and a sense region having about 3 to about 25 (e.g., about 3, 4, 5, 6, 7, 8, 9, 10, 11, 12, 13, 14, 15, 16, 17, 18, 19, 20, 21, 22, 23, 24, or 25) nucleotides that are complementary to the antisense region.

[0210] By “modulate” is meant that the expression of the gene, or level of RNA molecule or equivalent RNA molecules encoding one or more proteins or protein subunits, or activity of one or more proteins or protein subunits is up regulated or down regulated, such that expression, level, or activity is greater than or less than that observed in the absence of the modulator. For example, the term “modulate” can mean “inhibit,” but the use of the word “modulate” is not limited to this definition.

[0211] By “inhibit”, “down-regulate”, or “reduce”, it is meant that the expression of the gene, or level of RNA molecules or equivalent RNA molecules encoding one or more proteins or protein subunits, or activity of one or more proteins or protein subunits, is reduced below that observed in the absence of the nucleic acid molecules (e.g., siNA) of the invention. In one embodiment, inhibition, down-regulation or reduction with an siNA molecule is below that level observed in the presence of an inactive or attenuated molecule. In another embodiment, inhibition, down-regulation, or reduction with siNA molecules is below that level observed in the presence of, for example, an siNA molecule with scrambled sequence or with mismatches. In another embodiment, inhibition, down-regulation, or reduction of gene expression with a nucleic acid molecule of the instant invention is greater in the presence of the nucleic acid molecule than in its absence. In one embodiment, inhibition, down regulation, or reduction of gene expression is associated with post transcriptional silencing, such as RNAi mediated cleavage of a target nucleic acid molecule (e.g. RNA) or inhibition of translation. In one embodiment, inhibition, down regulation, or reduction of gene expression is associated with pretranscriptional silencing.

[0212] By “gene”, or “target gene”, is meant a nucleic acid that encodes an RNA, for example, nucleic acid sequences including, but not limited to, structural genes encoding a polypeptide. A gene or target gene can also encode a functional RNA (fRNA) or non-coding RNA (ncRNA), such as small temporal RNA (stRNA), micro RNA (mRNA), small nuclear RNA (snRNA), short interfering RNA (siRNA), small nucleolar RNA (snRNA), ribosomal RNA (rRNA), transfer RNA (tRNA) and precursor RNAs thereof. Such non-coding RNAs can serve as target nucleic acid molecules for siNA mediated RNA interference in modulating the activity of fRNA or ncRNA involved in functional or regulatory cellular processes. Abberant fRNA or ncRNA activity leading to disease can therefore be modulated by siNA molecules of the invention. siNA molecules targeting FRNA and ncRNA can also be used to manipulate or alter the genotype or phenotype of a subject, organism or cell, by intervening in cellular processes such as genetic imprinting, transcription, translation, or nucleic acid processing (e.g., transamination, methylation etc.). The target gene can be a gene derived from a cell, an endogenous gene, a transgene, or exogenous genes such as genes of a pathogen, for example a virus, which is present in the cell after infection thereof. The cell containing the target gene can be derived from or contained in any organism, for example a plant, animal, protozoan, virus, bacterium, or fungus. Non-limiting examples of plants include monocots, dicots, or gymnosperms. Non-limiting examples of animals include vertebrates or invertebrates. Non-limiting examples of fungi include molds or yeasts. For a review, see for example Snyder and Gerstein, 2003, Science, 300, 258-260.

[0213] By “non-canonical base pair” is meant any non-Watson Crick base pair, such as mismatches and/or wobble base pairs, inlcuding flipped mismatches, single hydrogen bond mismatches, trans-type mismatches, triple base interactions, and quadruple base interactions. Non-limiting examples of such non-canonical base pairs include, but are not limited to, AC reverse Hoogsteen, AC wobble, AU reverse Hoogsteen, GU wobble, AA N7 amino, CC 2-carbonyl-amino(H1)—N-3-amino(H2), GA sheared, UC 4-carbonyl-amino, UU imino-carbonyl, AC reverse wobble, AU Hoogsteen, AU reverse Watson Crick, CG reverse Watson Crick, GC N3-amino-amino N3, AA N1-amino symmetric, AA N7-amino symmetric, GA N7-N1 amino-carbonyl, GA+carbonyl-amino N7-N1, GG N1-carbonyl symmetric, GG N3-amino symmetric, CC carbonyl-amino symmetric, CC N3-amino symmetric, UU 2-carbonyl-imino symmetric, UU 4-carbonyl-imino symmetric, AA amino-N3, AA N1-amino, AC amino 2-carbonyl, AC N3-amino, AC N7-amino, AU amino-4-carbonyl, AU N1-imino, AU N3-imino, AU N7-imino, CC carbonyl-amino, GA amino-N1, GA amino-N7, GA carbonyl-amino, GA N3-amino, GC amino-N3, GC carbonyl-amino, GC N3-amino, GC N7-amino, GG amino-N7, GG carbonyl-imino, GG N7-amino, GU amino-2-carbonyl, GU carbonyl-imino, GU imino-2-carbonyl, GU N7-imino, psiU imino-2-carbonyl, UC 4-carbonyl-amino, UC imino-carbonyl, UU imino-4-carbonyl, AC C2-H—N3, GA carbonyl-C2-H, UU imino-4-carbonyl 2 carbonyl-C5-H, AC amino(A) N3(C)-carbonyl, GC imino amino-carbonyl, Gpsi imino-2-carbonyl amino-2-carbonyl, and GU imino amino-2-carbonyl base pairs.

[0214] By “BCR-ABL” or “BCR-ABL protein” as used herein is meant, any BCR-ABL protein, peptide, or polypeptide having BCR-ABL activity, such as encoded by BCR-ABL Genbank Accession Nos. shown in Table I. The term BCR-ABL also refers to nucleic acid sequences encoding any BCR-ABL protein, peptide, or polypeptide having BCR-ABL activity. The term “BCR-ABL” is also meant to include other BCR-ABL encoding sequence, such as BCR-ABL isoforms, mutant BCR-ABL genes, splice variants of BCR-ABL genes, and BCR-ABL gene polymorphisms.

[0215] By “ERG” or “ERG protein” as used herein is meant, any ERG protein, peptide, or polypeptide having ERG activity, such as encoded by ERG Genbank Accession Nos. shown in Table I. The term ERG also refers to nucleic acid sequences encoding any Ets family type transciption factor or fusion variant protein, peptide, or polypeptide thereof having ERG activity. The term “ERG” is also meant to include other ERG encoding sequence, such as ERG isoforms, mutant ERG genes, splice variants of ERG genes, and ERG gene polymorphisms.

[0216] By “proliferative disease” or “angiogenic disease state(s)” or “cancer” as used herein is meant, any disease or condition characterized by unregulated cell growth or replication as is known in the art; including breast cancer, cancers of the head and neck including various lymphomas such as mantle cell lymphoma, non-Hodgkins lymphoma, adenoma, squamous cell carcinoma, laryngeal carcinoma, cancers of the retina, cancers of the esophagus, multiple myeloma, ovarian cancer, uterine cancer, melanoma, colorectal cancer, lung cancer, bladder cancer, prostate cancer, glioblastoma, lung cancer (including non-small cell lung carcinoma), pancreatic cancer, cervical cancer, head and neck cancer, skin cancers, nasopharyngeal carcinoma, liposarcoma, epithelial carcinoma, renal cell carcinoma, gallbladder adeno carcinoma, parotid adenocarcinoma, endometrial sarcoma, multidrug resistant cancers; and proliferative diseases and conditions, such as neovascularization associated with tumor angiogenesis, macular degeneration (e.g., wet/dry AMD), corneal neovascularization, diabetic retinopathy, neovascular glaucoma, myopic degeneration and other proliferative diseases and conditions such as restenosis and polycystic kidney disease, and any other cancer or proliferative disease or condition that can respond to the level of BCR-ABL and/or ERG in a cell or tissue, alone or in combination with other therapies.

[0217] In certain embodiments, the term “cancer” as used herein refers to leukemia, such as chronic myelogenous leukemia (CML) and acute myelogenous leukemia (AML) resulting from the BCR-ABL fusion gene.

[0218] By “homologous sequence” is meant, a nucleotide sequence that is shared by one or more polynucleotide sequences, such as genes, gene transcripts and/or non-coding polynucleotides. For example, a homologous sequence can be a nucleotide sequence that is shared by two or more genes encoding related but different proteins, such as different members of a gene family, different protein epitopes, different protein isoforms or completely divergent genes, such as a cytokine and its corresponding receptors. A homologous sequence can be a nucleotide sequence that is shared by two or more non-coding polynucleotides, such as noncoding DNA or RNA, regulatory sequences, introns, and sites of transcriptional control or regulation. Homologous sequences can also include conserved sequence regions shared by more than one polynucleotide sequence. Homology does not need to be perfect homology (e.g., 100%), as partially homologous sequences are also contemplated by the instant invention (e.g., 99%, 98%, 97%, 96%, 95%, 94%, 93%, 92%, 91%, 90%, 89%, 88%, 87%, 86%, 85%, 84%, 83%, 82%, 81%, 80% etc.).

[0219] By “conserved sequence region” is meant, a nucleotide sequence of one or more regions in a polynucleotide does not vary significantly between generations or from one biological system, subject, or organism to another biological system, subject, or organism. The polynucleotide can include both coding and non-coding DNA and RNA.

[0220] By “sense region” is meant a nucleotide sequence of a siNA molecule having complementarity to an antisense region of the siNA molecule. In addition, the sense region of a siNA molecule can comprise a nucleic acid sequence having homology with a target nucleic acid sequence.

[0221] By “antisense region” is meant a nucleotide sequence of a siNA molecule having complementarity to a target nucleic acid sequence. In addition, the antisense region of a siNA molecule can optionally comprise a nucleic acid sequence having complementarity to a sense region of the siNA molecule.

[0222] By “target nucleic acid” is meant any nucleic acid sequence whose expression or activity is to be modulated. The target nucleic acid can be DNA or RNA.

[0223] By “complementarity” is meant that a nucleic acid can form hydrogen bond(s) with another nucleic acid sequence by either traditional Watson-Crick or other non-traditional types. In reference to the nucleic molecules of the present invention, the binding free energy for a nucleic acid molecule with its complementary sequence is sufficient to allow the relevant function of the nucleic acid to proceed, e.g., RNAi activity. Determination of binding free energies for nucleic acid molecules is well known in the art (see, e.g., Turner et al., 1987, CSH Symp. Quant. Biol. LII pp. 123-133; Frier et al., 1986, Proc. Nat. Acad. Sci. USA 83: 9373-9377; Turner et al., 1987, J. Am. Chem. Soc. 109: 3783-3785). A percent complementarity indicates the percentage of contiguous residues in a nucleic acid molecule that can form hydrogen bonds (e.g., Watson-Crick base pairing) with a second nucleic acid sequence (e.g., 5, 6, 7, 8, 9, or 10 nucleotides out of a total of 10 nucleotides in the first oligonucleotide being based paired to a second nucleic acid sequence having 10 nucleotides represents 50%, 60%, 70%, 80%, 90%, and 100% complementary respectively). “Perfectly complementary” means that all the contiguous residues of a nucleic acid sequence will hydrogen bond with the same number of contiguous residues in a second nucleic acid sequence. In one embodiment, a siNA molecule of the invention comprises about 15 to about 30 or more (e.g., about 15, 16, 17, 18, 19, 20, 21, 22, 23, 24, 25, 26, 27, 28, 29, or 30 or more) nucleotides that are complementary to one or more target nucleic acid molecules or a portion thereof.

[0224] In one embodiment, siNA molecules of the invention that down regulate or reduce BCR-ABL and/or ERG gene expression are used for preventing or treating cancer, including cancers of the lung, colon, breast, prostate, and cervix, lymphoma, Ewing's sarcoma and related tumors, melanoma, angiogenic disease states such as tumor angiogenesis, leukemia (including acute myeloid leukemia and CML); diabetic retinopathy; macular degeneration; neovascular glaucoma; myopic degeneration; arthritis (such as rheumatoid arthritis); psoriasis; verruca vulgaris, angiofibroma of tuberous sclerosis; port-wine stains; Sturge Weber syndrome; Kippel-Trenaunay-Weber syndrome; Osler-Weber-rendu symdrome; osteoporosis; and wound healing in a subject or organism.

[0225] In one embodiment, the siNA molecules of the invention are used to treat cancer, including cancers of the lung, colon, breast, prostate, and cervix, lymphoma, Ewing's sarcoma and related tumors, melanoma, angiogenic disease states such as tumor angiogenesis, leukemia (including acute myeloid leukemia and CML); diabetic retinopathy; macular degeneration; neovascular glaucoma; myopic degeneration; arthritis (such as rheumatoid arthritis); psoriasis; verruca vulgaris, angiofibroma of tuberous sclerosis; port-wine stains; Sturge Weber syndrome; Kippel-Trenaunay-Weber syndrome; Osler-Weber-rendu symdrome; osteoporosis; and wound healing in a subject or organism.

[0226] In one embodiment of the present invention, each sequence of a siNA molecule of the invention is independently about 15 to about 30 nucleotides in length, in specific embodiments about 15, 16, 17, 18, 19, 20, 21, 22, 23, 24, 25, 26, 27, 28, 29, or 30 nucleotides in length. In another embodiment, the siNA duplexes of the invention independently comprise about 15 to about 30 base pairs (e.g., about 15, 16, 17, 18, 19, 20, 21, 22, 23, 24, 25, 26, 27, 28, 29, or 30). In another embodiment, one or more strands of the siNA molecule of the invention independently comprises about 15 to about 30 nucleotides (e.g., about 15, 16, 17, 18, 19, 20, 21, 22, 23, 24, 25, 26, 27, 28, 29, or 30) that are complementary to a target nucleic acid molecule. In yet another embodiment, siNA molecules of the invention comprising hairpin or circular structures are about 35 to about 55 (e.g., about 35, 40, 45, 50 or 55) nucleotides in length, or about 38 to about 44 (e.g., about 38, 39, 40, 41, 42, 43, or 44) nucleotides in length and comprising about 15 to about 25 (e.g., about 15, 16, 17, 18, 19, 20, 21, 22, 23, 24, or 25) base pairs. Exemplary siNA molecules of the invention are shown in Table H. Exemplary synthetic siNA molecules of the invention are shown in Table III and/or FIGS. 4-5.

[0227] As used herein “cell” is used in its usual biological sense, and does not refer to an entire multicellular organism, e.g., specifically does not refer to a human. The cell can be present in an organism, e.g., birds, plants and mammals such as humans, cows, sheep, apes, monkeys, swine, dogs, and cats. The cell can be prokaryotic (e.g., bacterial cell) or eukaryotic (e.g., mammalian or plant cell). The cell can be of somatic or germ line origin, totipotent or pluripotent, dividing or non-dividing. The cell can also be derived from or can comprise a gamete or embryo, a stem cell, or a fully differentiated cell.

[0228] The siNA molecules of the invention are added directly, or can be complexed with cationic lipids, packaged within liposomes, or otherwise delivered to target cells or tissues. The nucleic acid or nucleic acid complexes can be locally administered to relevant tissues ex vivo, or in vivo through direct dermal application, transdermal application, or injection, with or without their incorporation in biopolymers. In particular embodiments, the nucleic acid molecules of the invention comprise sequences shown in Tables II-Ill and/or FIGS. 4-5. Examples of such nucleic acid molecules consist essentially of sequences defined in these tables and figures. Furthermore, the chemically modified constructs described in Table IV can be applied to any siNA sequence of the invention.

[0229] In another aspect, the invention provides mammalian cells containing one or more siNA molecules of this invention. The one or more siNA molecules can independently be targeted to the same or different sites.

[0230] By “RNA” is meant a molecule comprising at least one ribonucleotide residue. By “ribonucleotide” is meant a nucleotide with a hydroxyl group at the 2′ position of a β-D-ribofuranose moiety. The terms include double-stranded RNA, single-stranded RNA, isolated RNA such as partially purified RNA, essentially pure RNA, synthetic RNA, recombinantly produced RNA, as well as altered RNA that differs from naturally occurring RNA by the addition, deletion, substitution and/or alteration of one or more nucleotides. Such alterations can include addition of non-nucleotide material, such as to the end(s) of the siNA or internally, for example at one or more nucleotides of the RNA. Nucleotides in the RNA molecules of the instant invention can also comprise non-standard nucleotides, such as non-naturally occurring nucleotides or chemically synthesized nucleotides or deoxynucleotides. These altered RNAs can be referred to as analogs or analogs of naturally-occurring RNA.

[0231] By “subject” is meant an organism, which is a donor or recipient of explanted cells or the cells themselves. “Subject” also refers to an organism to which the nucleic acid molecules of the invention can be administered. A subject can be a mammal or mammalian cells, including a human or human cells.

[0232] The term “phosphorothioate” as used herein refers to an internucleotide linkage having Formula I, wherein Z and/or W comprise a sulfur atom. Hence, the term phosphorothioate refers to both phosphorothioate and phosphorodithioate internucleotide linkages.

[0233] The term “phosphonoacetate” as used herein refers to an internucleotide linkage having Formula I, wherein Z and/or W comprise an acetyl or protected acetyl group.

[0234] The term “thiophosphonoacetate” as used herein refers to an internucleotide linkage having Formula I, wherein Z comprises an acetyl or protected acetyl group and W comprises a sulfur atom or alternately W comprises an acetyl or protected acetyl group and Z comprises a sulfur atom.

[0235] The term “universal base” as used herein refers to nucleotide base analogs that form base pairs with each of the natural DNA/RNA bases with little discrimination between them. Non-limiting examples of universal bases include C-phenyl, C-naphthyl and other aromatic derivatives, inosine, azole carboxamides, and nitroazole derivatives such as 3-nitropyrrole, 4-nitroindole, 5-nitroindole, and 6-nitroindole as known in the art (see for example Loakes, 2001, Nucleic Acids Research, 29, 2437-2447).

[0236] The term “acyclic nucleotide” as used herein refers to any nucleotide having an acyclic ribose sugar, for example where any of the ribose carbons (C1, C2, C3, C4, or C5), are independently or in combination absent from the nucleotide.

[0237] The nucleic acid molecules of the instant invention, individually, or in combination or in conjunction with other drugs, can be used to for preventing or treating cancer, including cancers of the lung, colon, breast, prostate, and cervix, lymphoma, Ewing's sarcoma and related tumors, melanoma, angiogenic disease states such as tumor angiogenesis, leukemia (including acute myeloid leukemia and CML); diabetic retinopathy; macular degeneration; neovascular glaucoma; myopic degeneration; arthritis (such as rheumatoid arthritis); psoriasis; verruca vulgaris, angiofibroma of tuberous sclerosis; port-wine stains; Sturge Weber syndrome; Kippel-Trenaunay-Weber syndrome; Osler-Weber-rendu symdrome; osteoporosis; and/or wound healing in a subject or organism.

[0238] For example, the siNA molecules can be administered to a subject or can be administered to other appropriate cells evident to those skilled in the art, individually or in combination with one or more drugs under conditions suitable for the treatment.

[0239] In a further embodiment, the siNA molecules can be used in combination with other known treatments to prevent or treat cancer, including cancers of the lung, colon, breast, prostate, and cervix, lymphoma, Ewing's sarcoma and related tumors, melanoma, angiogenic disease states such as tumor angiogenesis, leukemia (including acute myeloid leukemia and CML); diabetic retinopathy; macular degeneration; neovascular glaucoma; myopic degeneration; arthritis (such as rheumatoid arthritis); psoriasis; verruca vulgaris, angiofibroma of tuberous sclerosis; port-wine stains; Sturge Weber syndrome; Kippel-Trenaunay-Weber syndrome; Osler-Weber-rendu symdrome; osteoporosis; and/or wound healing in a subject or organism. For example, the described molecules could be used in combination with one or more known compounds, treatments, or procedures to prevent or treat cancer, including cancers of the lung, colon, breast, prostate, and cervix, lymphoma, Ewing's sarcoma and related tumors, melanoma, angiogenic disease states such as tumor angiogenesis, leukemia (including acute myeloid leukemia and CML); diabetic retinopathy; macular degeneration; neovascular glaucoma; myopic degeneration; arthritis (such as rheumatoid arthritis); psoriasis; verruca vulgaris, angiofibroma of tuberous sclerosis; port-wine stains; Sturge Weber syndrome; Kippel-Trenaunay-Weber syndrome; Osler-Weber-rendu symdrome; osteoporosis; and/or wound healing in a subject or organism as are known in the art.

[0240] In one embodiment, the invention features an expression vector comprising a nucleic acid sequence encoding at least one siNA molecule of the invention, in a manner which allows expression of the siNA molecule. For example, the vector can contain sequence(s) encoding both strands of a siNA molecule comprising a duplex. The vector can also contain sequence(s) encoding a single nucleic acid molecule that is self-complementary and thus forms a siNA molecule. Non-limiting examples of such expression vectors are described in Paul et al., 2002, Nature Biotechnology, 19, 505; Miyagishi and Taira, 2002, Nature Biotechnology, 19, 497; Lee et al., 2002, Nature Biotechnology, 19, 500; and Novina et al., 2002, Nature Medicine, advance online publication doi: 10.1038/nm725.

[0241] In another embodiment, the invention features a mammalian cell, for example, a human cell, including an expression vector of the invention.

[0242] In yet another embodiment, the expression vector of the invention comprises a sequence for a siNA molecule having complementarity to a RNA molecule referred to by a Genbank Accession numbers, for example Genbank Accession Nos. shown in Table I.

[0243] In one embodiment, an expression vector of the invention comprises a nucleic acid sequence encoding two or more siNA molecules, which can be the same or different.

[0244] In another aspect of the invention, siNA molecules that interact with target RNA molecules and down-regulate gene encoding target RNA molecules (for example target RNA molecules referred to by Genbank Accession numbers herein) are expressed from transcription units inserted into DNA or RNA vectors. The recombinant vectors can be DNA plasmids or viral vectors. siNA expressing viral vectors can be constructed based on, but not limited to, adeno-associated virus, retrovirus, adenovirus, or alphavirus. The recombinant vectors capable of expressing the siNA molecules can be delivered as described herein, and persist in target cells. Alternatively, viral vectors can be used that provide for transient expression of siNA molecules. Such vectors can be repeatedly administered as necessary. Once expressed, the siNA molecules bind and down-regulate gene function or expression via RNA interference (RNAi). Delivery of siNA expressing vectors can be systemic, such as by intravenous or intramuscular administration, by administration to target cells ex-planted from a subject followed by reintroduction into the subject, or by any other means that would allow for introduction into the desired target cell.

[0245] By “vectors” is meant any nucleic acid- and/or viral-based technique used to deliver a desired nucleic acid.

[0246] Other features and advantages of the invention will be apparent from the following description of the preferred embodiments thereof, and from the claims.

### BRIEF DESCRIPTION OF THE DRAWINGS

[0247] FIG. 1 shows a non-limiting example of a scheme for the synthesis of siNA molecules. The complementary siNA sequence strands, strand 1 and strand 2, are synthesized in tandem and are connected by a cleavable linkage, such as a nucleotide succinate or abasic succinate, which can be the same or different from the cleavable linker used for solid phase synthesis on a solid support. The synthesis can be either solid phase or solution phase, in the example shown, the synthesis is a solid phase synthesis. The synthesis is performed such that a protecting group, such as a dimethoxytrityl group, remains intact on the terminal nucleotide of the tandem oligonucleotide. Upon cleavage and deprotection of the oligonucleotide, the two siNA strands spontaneously hybridize to form a siNA duplex, which allows the purification of the duplex by utilizing the properties of the terminal protecting group, for example by applying a trityl on purification method wherein only duplexes/oligonucleotides with the terminal protecting group are isolated.

[0248] FIG. 2 shows a MALDI-TOF mass spectrum of a purified siNA duplex synthesized by a method of the invention. The two peaks shown correspond to the predicted mass of the separate siNA sequence strands. This result demonstrates that the siNA duplex generated from tandem synthesis can be purified as a single entity using a simple trityl-on purification methodology.

[0249] FIG. 3 shows a non-limiting proposed mechanistic representation of target RNA degradation involved in RNAi. Double-stranded RNA (dsRNA), which is generated by RNA-dependent RNA polymerase (RdRP) from foreign single-stranded RNA, for example viral, transposon, or other exogenous RNA, activates the DICER enzyme that in turn generates siNA duplexes. Alternately, synthetic or expressed siNA can be introduced directly into a cell by appropriate means. An active siNA complex forms which recognizes a target RNA, resulting in degradation of the target RNA by the RISC endonuclease complex or in the synthesis of additional RNA by RNA-dependent RNA polymerase (RdRP), which can activate DICER and result in additional siNA molecules, thereby amplifying the RNAi response.

[0250] FIG. 4A-F shows non-limiting examples of chemically-modified siNA constructs of the present invention. In the figure, N stands for any nucleotide (adenosine, guanosine, cytosine, uridine, or optionally thymidine, for example thymidine can be substituted in the overhanging regions designated by parenthesis (N N). Various modifications are shown for the sense and antisense strands of the siNA constructs.

[0251] FIG. 4A: The sense strand comprises 21 nucleotides wherein the two terminal 3′-nucleotides are optionally base paired and wherein all nucleotides present are ribonucleotides except for (N N) nucleotides, which can comprise ribonucleotides, deoxynucleotides, universal bases, or other chemical modifications described herein. The antisense strand comprises 21 nucleotides, optionally having a 3′-terminal glyceryl moiety wherein the two terminal 3′-nucleotides are optionally complementary to the target RNA sequence, and wherein all nucleotides present are ribonucleotides except for (N N) nucleotides, which can comprise ribonucleotides, deoxynucleotides, universal bases, or other chemical modifications described herein. A modified internucleotide linkage, such as a phosphorothioate, phosphorodithioate or other modified internucleotide linkage as described herein, shown as “s”, optionally connects the (N N) nucleotides in the antisense strand.

[0252] FIG. 4B: The sense strand comprises 21 nucleotides wherein the two terminal 3′-nucleotides are optionally base paired and wherein all pyrimidine nucleotides that may be present are 2′deoxy-2′-fluoro modified nucleotides and all purine nucleotides that may be present are 2′-O-methyl modified nucleotides except for (N N) nucleotides, which can comprise ribonucleotides, deoxynucleotides, universal bases, or other chemical modifications described herein. The antisense strand comprises 21 nucleotides, optionally having a 3′-terminal glyceryl moiety and wherein the two terminal 3′-nucleotides are optionally complementary to the target RNA sequence, and wherein all pyrimidine nucleotides that may be present are 2′-deoxy-2′-fluoro modified nucleotides and all purine nucleotides that may be present are 2′-O-methyl modified nucleotides except for (N N) nucleotides, which can comprise ribonucleotides, deoxynucleotides, universal bases, or other chemical modifications described herein. A modified internucleotide linkage, such as a phosphorothioate, phosphorodithioate or other modified internucleotide linkage as described herein, shown as “s”, optionally connects the (N N) nucleotides in the sense and antisense strand.

[0253] FIG. 4C: The sense strand comprises 21 nucleotides having 5′- and 3′-terminal cap moieties wherein the two terminal 3′-nucleotides are optionally base paired and wherein all pyrimidine nucleotides that may be present are 2′-O-methyl or 2′-deoxy-2′-fluoro modified nucleotides except for (N N) nucleotides, which can comprise ribonucleotides, deoxynucleotides, universal bases, or other chemical modifications described herein. The antisense strand comprises 21 nucleotides, optionally having a 3′-terminal glyceryl moiety and wherein the two terminal 3′-nucleotides are optionally complementary to the target RNA sequence, and wherein all pyrimidine nucleotides that may be present are 2′-deoxy-2′-fluoro modified nucleotides except for (N N) nucleotides, which can comprise ribonucleotides, deoxynucleotides, universal bases, or other chemical modifications described herein. A modified internucleotide linkage, such as a phosphorothioate, phosphorodithioate or other modified internucleotide linkage as described herein, shown as “s”, optionally connects the (N N) nucleotides in the antisense strand.

[0254] FIG. 4D: The sense strand comprises 21 nucleotides having 5′- and 3′-terminal cap moieties wherein the two terminal 3′-nucleotides are optionally base paired and wherein all pyrimidine nucleotides that may be present are 2′-deoxy-2′-fluoro modified nucleotides except for (N N) nucleotides, which can comprise ribonucleotides, deoxynucleotides, universal bases, or other chemical modifications described herein and wherein and all purine nucleotides that may be present are 2′-deoxy nucleotides. The antisense strand comprises 21 nucleotides, optionally having a 3′-terminal glyceryl moiety and wherein the two terminal 3′-nucleotides are optionally complementary to the target RNA sequence, wherein all pyrimidine nucleotides that may be present are 2′-deoxy-2′-fluoro modified nucleotides and all purine nucleotides that may be present are 2′-O-methyl modified nucleotides except for (N N) nucleotides, which can comprise ribonucleotides, deoxynucleotides, universal bases, or other chemical modifications described herein. A modified internucleotide linkage, such as a phosphorothioate, phosphorodithioate or other modified internucleotide linkage as described herein, shown as “s”, optionally connects the (N N) nucleotides in the antisense strand.

[0255] FIG. 4E: The sense strand comprises 21 nucleotides having 5′- and 3′-terminal cap moieties wherein the two terminal 3′-nucleotides are optionally base paired and wherein all pyrimidine nucleotides that may be present are 2′-deoxy-2′-fluoro modified nucleotides except for (N N) nucleotides, which can comprise ribonucleotides, deoxynucleotides, universal bases, or other chemical modifications described herein. The antisense strand comprises 21 nucleotides, optionally having a 3′-terminal glyceryl moiety and wherein the two terminal 3′-nucleotides are optionally complementary to the target RNA sequence, and wherein all pyrimidine nucleotides that may be present are 2′-deoxy-2′-fluoro modified nucleotides and all purine nucleotides that may be present are 2′-O-methyl modified nucleotides except for (N N) nucleotides, which can comprise ribonucleotides, deoxynucleotides, universal bases, or other chemical modifications described herein. A modified internucleotide linkage, such as a phosphorothioate, phosphorodithioate or other modified internucleotide linkage as described herein, shown as “s”, optionally connects the (N N) nucleotides in the antisense strand.

[0256] FIG. 4F: The sense strand comprises 21 nucleotides having 5′- and 3′-terminal cap moieties wherein the two terminal 3′-nucleotides are optionally base paired and wherein all pyrimidine nucleotides that may be present are 2′-deoxy-2′-fluoro modified nucleotides except for (N N) nucleotides, which can comprise ribonucleotides, deoxynucleotides, universal bases, or other chemical modifications described herein and wherein and all purine nucleotides that may be present are 2′-deoxy nucleotides. The antisense strand comprises 21 nucleotides, optionally having a 3′-terminal glyceryl moiety and wherein the two terminal 3′-nucleotides are optionally complementary to the target RNA sequence, and having one 3′-terminal phosphorothioate internucleotide linkage and wherein all pyrimidine nucleotides that may be present are 2′-deoxy-2′-fluoro modified nucleotides and all purine nucleotides that may be present are 2′-deoxy nucleotides except for (N N) nucleotides, which can comprise ribonucleotides, deoxynucleotides, universal bases, or other chemical modifications described herein. A modified internucleotide linkage, such as a phosphorothioate, phosphorodithioate or other modified internucleotide linkage as described herein, shown as “s”, optionally connects the (N N) nucleotides in the antisense strand. The antisense strand of constructs A-F comprise sequence complementary to any target nucleic acid sequence of the invention. Furthermore, when a glyceryl moiety (L) is present at the 3′-end of the antisense strand for any construct shown in FIG. 4A-F, the modified internucleotide linkage is optional.

[0257] FIG. 5A-F shows non-limiting examples of specific chemically-modified siNA sequences of the invention. A-F applies the chemical modifications described in FIG. 4A-F to a BCR-ABL siNA sequence. Such chemical modifications can be applied to any BCR-ABL and/or ERG sequence and/or BCR-ABL and/or ERG polymorphism sequence.

[0258] FIG. 6 shows non-limiting examples of different siNA constructs of the invention. The examples shown (constructs 1, 2, and 3) have 19 representative base pairs; however, different embodiments of the invention include any number of base pairs described herein. Bracketed regions represent nucleotide overhangs, for example, comprising about 1, 2, 3, or 4 nucleotides in length, preferably about 2 nucleotides. Constructs 1 and 2 can be used independently for RNAi activity. Construct 2 can comprise a polynucleotide or non-nucleotide linker, which can optionally be designed as a biodegradable linker. In one embodiment, the loop structure shown in construct 2 can comprise a biodegradable linker that results in the formation of construct 1 in vivo and/or in vitro. In another example, construct 3 can be used to generate construct 2 under the same principle wherein a linker is used to generate the active siNA construct 2 in vivo and/or in vitro, which can optionally utilize another biodegradable linker to generate the active siNA construct 1 in vivo and/or in vitro. As such, the stability and/or activity of the siNA constructs can be modulated based on the design of the siNA construct for use in vivo or in vitro and/or in vitro.

[0259] FIG. 7A-C is a diagrammatic representation of a scheme utilized in generating an expression cassette to generate siNA hairpin constructs.

[0260] FIG. 7A: A DNA oligomer is synthesized with a 5′-restriction site (R1) sequence followed by a region having sequence identical (sense region of siNA) to a predetermined BCR-ABL and/or ERG target sequence, wherein the sense region comprises, for example, about 19, 20, 21, or 22 nucleotides (N) in length, which is followed by a loop sequence of defined sequence (X), comprising, for example, about 3 to about 10 nucleotides.

[0261] FIG. 7B: The synthetic construct is then extended by DNA polymerase to generate a hairpin structure having self-complementary sequence that will result in a siNA transcript having specificity for a BCR-ABL and/or ERG target sequence and having self-complementary sense and antisense regions.

[0262] FIG. 7C: The construct is heated (for example to about 95° C.) to linearize the sequence, thus allowing extension of a complementary second DNA strand using a primer to the 3′-restriction sequence of the first strand. The double-stranded DNA is then inserted into an appropriate vector for expression in cells. The construct can be designed such that a 3′-terminal nucleotide overhang results from the transcription, for example, by engineering restriction sites and/or utilizing a poly-U termination region as described in Paul et al., 2002, Nature Biotechnology, 29, 505-508.

[0263] FIG. 8A-C is a diagrammatic representation of a scheme utilized in generating an expression cassette to generate double-stranded siNA constructs.

[0264] FIG. 8A: A DNA oligomer is synthesized with a 5′-restriction (R1) site sequence followed by a region having sequence identical (sense region of siNA) to a predetermined BCR-ABL and/or ERG target sequence, wherein the sense region comprises, for example, about 19, 20, 21, or 22 nucleotides (N) in length, and which is followed by a 3′-restriction site (R2) which is adjacent to a loop sequence of defined sequence (X).

[0265] FIG. 8B: The synthetic construct is then extended by DNA polymerase to generate a hairpin structure having self-complementary sequence.

[0266] FIG. 8C: The construct is processed by restriction enzymes specific to R1 and R2 to generate a double-stranded DNA which is then inserted into an appropriate vector for expression in cells. The transcription cassette is designed such that a U6 promoter region flanks each side of the dsDNA which generates the separate sense and antisense strands of the siNA. Poly T termination sequences can be added to the constructs to generate U overhangs in the resulting transcript.

[0267] FIG. 9A-E is a diagrammatic representation of a method used to determine target sites for siNA mediated RNAi within a particular target nucleic acid sequence, such as messenger RNA.

[0268] FIG. 9A: A pool of siNA oligonucleotides are synthesized wherein the antisense region of the siNA constructs has complementarity to target sites across the target nucleic acid sequence, and wherein the sense region comprises sequence complementary to the antisense region of the siNA.

[0269] FIGS. 9B&C: (FIG. 9B) The sequences are pooled and are inserted into vectors such that (FIG. 9C) transfection of a vector into cells results in the expression of the siNA.

[0270] FIG. 9D: Cells are sorted based on phenotypic change that is associated with modulation of the target nucleic acid sequence.

[0271] FIG. 9E: The siNA is isolated from the sorted cells and is sequenced to identify efficacious target sites within the target nucleic acid sequence.

[0272] FIG. 10 shows non-limiting examples of different stabilization chemistries (1-10) that can be used, for example, to stabilize the 3′-end of siNA sequences of the invention, including (1) [3-3′]-inverted deoxyribose; (2) deoxyribonucleotide; (3) [5′-3′]-3′-deoxyribonucleotide; (4) [5′-3′]-ribonucleotide; (5) [5′-3′]-3′-O-methyl ribonucleotide; (6) 3′-glyceryl; (7) [3′-5′]-3′-deoxyribonucleotide; (8) [3′-3′]-deoxyribonucleotide; (9) [5′-2′]-deoxyribonucleotide; and (10) [5-3′]-dideoxyribonucleotide. In addition to modified and unmodified backbone chemistries indicated in the figure, these chemistries can be combined with different backbone modifications as described herein, for example, backbone modifications having Formula I. In addition, the 2′-deoxy nucleotide shown 5′ to the terminal modifications shown can be another modified or unmodified nucleotide or non-nucleotide described herein, for example modifications having any of Formulae I-VII or any combination thereof.

[0273] FIG. 11 shows a non-limiting example of a strategy used to identify chemically modified siNA constructs of the invention that are nuclease resistance while preserving the ability to mediate RNAi activity. Chemical modifications are introduced into the siNA construct based on educated design parameters (e.g. introducing 2′-mofications, base modifications, backbone modifications, terminal cap modifications etc). The modified construct in tested in an appropriate system (e.g. human serum for nuclease resistance, shown, or an animal model for PK/delivery parameters). In parallel, the siNA construct is tested for RNAi activity, for example in a cell culture system such as a luciferase reporter assay). Lead siNA constructs are then identified which possess a particular characteristic while maintaining RNAi activity, and can be further modified and assayed once again. This same approach can be used to identify siNA-conjugate molecules with improved pharmacokinetic profiles, delivery, and RNAi activity.

[0274] FIG. 12 shows non-limiting examples of phosphorylated siNA molecules of the invention, including linear and duplex constructs and asymmetric derivatives thereof.

[0275] FIG. 13 shows non-limiting examples of chemically modified terminal phosphate groups of the invention.

[0276] FIG. 14A shows a non-limiting example of methodology used to design self complementary DFO constructs utilizing palidrome and/or repeat nucleic acid sequences that are identified in a target nucleic acid sequence. (i) A palindrome or repeat sequence is identified in a nucleic acid target sequence. (ii) A sequence is designed that is complementary to the target nucleic acid sequence and the palindrome sequence. (iii) An inverse repeat sequence of the non-palindrome/repeat portion of the complementary sequence is appended to the 3′-end of the complementary sequence to generate a self complementary DFO molecule comprising sequence complementary to the nucleic acid target. (iv) The DFO molecule can self-assemble to form a double stranded oligonucleotide. FIG. 14B shows a non-limiting representative example of a duplex forming oligonucleotide sequence. FIG. 14C shows a non-limiting example of the self assembly schematic of a representative duplex forming oligonucleotide sequence. FIG. 14D shows a non-limiting example of the self assembly schematic of a representative duplex forming oligonucleotide sequence followed by interaction with a target nucleic acid sequence resulting in modulation of gene expression.

[0277] FIG. 15 shows a non-limiting example of the design of self complementary DFO constructs utilizing palidrome and/or repeat nucleic acid sequences that are incorporated into the DFO constructs that have sequence complementary to any target nucleic acid sequence of interest. Incorporation of these palindrome/repeat sequences allow the design of DFO constructs that form duplexes in which each strand is capable of mediating modulation of target gene expression, for example by RNAi. First, the target sequence is identified. A complementary sequence is then generated in which nucleotide or non-nucleotide modifications (shown as X or Y) are introduced into the complementary sequence that generate an artificial palindrome (shown as XYXYXY in the Figure). An inverse repeat of the non-palindrome/repeat complementary sequence is appended to the 3′-end of the complementary sequence to generate a self complementary DFO comprising sequence complementary to the nucleic acid target. The DFO can self-assemble to form a double stranded oligonucleotide.

[0278] FIG. 16 shows non-limiting examples of multifunctional siNA molecules of the invention comprising two separate polynucleotide sequences that are each capable of mediating RNAi directed cleavage of differing target nucleic acid sequences. FIG. 16A shows a non-limiting example of a multifunctional siNA molecule having a first region that is complementary to a first target nucleic acid sequence (complementary region 1) and a second region that is complementary to a second target nucleic acid sequence (complementary region 2), wherein the first and second complementary regions are situated at the 3′-ends of each polynucleofide sequence in the multifunctional siNA. The dashed portions of each polynucleotide sequence of the multifunctional siNA construct have complementarity with regard to corresponding portions of the siNA duplex, but do not have complementarity to the target nucleic acid sequences. FIG. 16B shows a non-limiting example of a multifunctional siNA molecule having a first region that is complementary to a first target nucleic acid sequence (complementary region 1) and a second region that is complementary to a second target nucleic acid sequence (complementary region 2), wherein the first and second complementary regions are situated at the 5′-ends of each polynucleotide sequence in the multifunctional siNA. The dashed portions of each polynucleotide sequence of the multifunctional siNA construct have complementarity with regard to corresponding portions of the siNA duplex, but do not have complementarity to the target nucleic acid sequences.

[0279] FIG. 17 shows non-limiting examples of multifunctional siNA molecules of the invention comprising a single polynucleotide sequence comprising distinct regions that are each capable of mediating RNAi directed cleavage of differing target nucleic acid sequences. FIG. 17A shows a non-limiting example of a multifunctional siNA molecule having a first region that is complementary to a first target nucleic acid sequence (complementary region 1) and a second region that is complementary to a second target nucleic acid sequence (complementary region 2), wherein the second complementary region is situated at the 3′-end of the polynucleotide sequence in the multifunctional siNA. The dashed portions of each polynucleotide sequence of the multifunctional siNA construct have complementarity with regard to corresponding portions of the siNA duplex, but do not have complementarity to the target nucleic acid sequences. FIG. 17B shows a non-limiting example of a multifunctional siNA molecule having a first region that is complementary to a first target nucleic acid sequence (complementary region 1) and a second region that is complementary to a second target nucleic acid sequence (complementary region 2), wherein the first complementary region is situated at the 5′-end of the polynucleotide sequence in the multifunctional siNA. The dashed portions of each polynucleotide sequence of the multifunctional siNA construct have complementarity with regard to corresponding portions of the siNA duplex, but do not have complementarity to the target nucleic acid sequences. In one embodiment, these multifunctional siNA constructs are processed in vivo or in vitro to generate multifunctional siNA constructs as shown in FIG. 16.

[0280] FIG. 18 shows non-limiting examples of multifunctional siNA molecules of the invention comprising two separate polynucleotide sequences that are each capable of mediating RNAi directed cleavage of differing target nucleic acid sequences and wherein the multifunctional siNA construct further comprises a self complementary, palindrome, or repeat region, thus enabling shorter bifuctional siNA constructs that can mediate RNA interference against differing target nucleic acid sequences. FIG. 18A shows a non-limiting example of a multifunctional siNA molecule having a first region that is complementary to a first target nucleic acid sequence (complementary region 1) and a second region that is complementary to a second target nucleic acid sequence (complementary region 2), wherein the first and second complementary regions are situated at the 3′-ends of each polynucleotide sequence in the multifunctional siNA, and wherein the first and second complementary regions further comprise a self complementary, palindrome, or repeat region. The dashed portions of each polynucleotide sequence of the multifunctional siNA construct have complementarity with regard to corresponding portions of the siNA duplex, but do not have complementarity to the target nucleic acid sequences. FIG. 18B shows a non-limiting example of a multifunctional siNA molecule having a first region that is complementary to a first target nucleic acid sequence (complementary region 1) and a second region that is complementary to a second target nucleic acid sequence (complementary region 2), wherein the first and second complementary regions are situated at the 5′-ends of each polynucleotide sequence in the multifunctional siNA, and wherein the first and second complementary regions further comprise a self complementary, palindrome, or repeat region. The dashed portions of each polynucleotide sequence of the multifunctional siNA construct have complementarity with regard to corresponding portions of the siNA duplex, but do not have complementarity to the target nucleic acid sequences.

[0281] FIG. 19 shows non-limiting examples of multifunctional siNA molecules of the invention comprising a single polynucleotide sequence comprising distinct regions that are each capable of mediating RNAi directed cleavage of differing target nucleic acid sequences and wherein the multifunctional siNA construct further comprises a self complementary, palindrome, or repeat region, thus enabling shorter bifuctional siNA constructs that can mediate RNA interference against differing target nucleic acid sequences. FIG. 19A shows a non-limiting example of a multifunctional siNA molecule having a first region that is complementary to a first target nucleic acid sequence (complementary region 1) and a second region that is complementary to a second target nucleic acid sequence (complementary region 2), wherein the second complementary region is situated at the 3′-end of the polynucleotide sequence in the multifunctional siNA, and wherein the first and second complementary regions further comprise a self complementary, palindrome, or repeat region. The dashed portions of each polynucleotide sequence of the multifunctional siNA construct have complementarity with regard to corresponding portions of the siNA duplex, but do not have complementarity to the target nucleic acid sequences. FIG. 19B shows a non-limiting example of a multifunctional siNA molecule having a first region that is complementary to a first target nucleic acid sequence (complementary region 1) and a second region that is complementary to a second target nucleic acid sequence (complementary region 2), wherein the first complementary region is situated at the 5′-end of the polynucleotide sequence in the multifunctional siNA, and wherein the first and second complementary regions further comprise a self complementary, palindrome, or repeat region. The dashed portions of each polynucleotide sequence of the multifunctional siNA construct have complementarity with regard to corresponding portions of the siNA duplex, but do not have complementarity to the target nucleic acid sequences. In one embodiment, these multifunctional siNA constructs are processed in vivo or in vitro to generate multifunctional siNA constructs as shown in FIG. 18.

[0282] FIG. 20 shows a non-limiting example of how multifunctional siNA molecules of the invention can target two separate target nucleic acid molecules, such as separate RNA molecules encoding differing proteins, for example, a cytokine and its corresponding receptor, differing viral strains, a virus and a cellular protein involved in viral infection or replication, or differing proteins involved in a common or divergent biologic pathway that is implicated in the maintenance of progression of disease. Each strand of the multifunctional siNA construct comprises a region having complementarity to separate target nucleic acid molecules. The multifunctional siNA molecule is designed such that each strand of the siNA can be utilized by the RISC complex to initiate RNA interference mediated cleavage of its corresponding target. These design parameters can include destabilization of each end of the siNA construct (see for example Schwarz et al., 2003, Cell, 115, 199-208). Such destabilization can be accomplished for example by using guanosine-cytidine base pairs, alternate base pairs (e.g., wobbles), or destabilizing chemically modified nucleotides at terminal nucleotide positions as is known in the art.

[0283] FIG. 21 shows a non-limiting example of how multifunctional siNA molecules of the invention can target two separate target nucleic acid sequences within the same target nucleic acid molecule, such as alternate coding regions of a RNA, coding and non-coding regions of a RNA, or alternate splice variant regions of a RNA. Each strand of the multifunctional siNA construct comprises a region having complementarity to the separate regions of the target nucleic acid molecule. The multifunctional siNA molecule is designed such that each strand of the siNA can be utilized by the RISC complex to initiate RNA interference mediated cleavage of its corresponding target region. These design parameters can include destabilization of each end of the siNA construct (see for example Schwarz et al., 2003, Cell, 115, 199-208). Such destabilization can be accomplished for example by using guanosine-cytidine base pairs, alternate base pairs (e.g., wobbles), or destabilizing chemically modified nucleotides at terminal nucleotide positions as is known in the art.

[0284] FIG. 22A-F shows non-limiting examples of specific chemically-modified siNA sequences of the invention. A-F applies the chemical modifications described in FIG. 4A-F to an ERG2 siNA sequence.

[0285] FIG. 23 shows a non-limiting example of reduction of ERG2 mRNA in HeLa cells mediated by siNAs that target ERG2 mRNA. HeLa cells were transfected with 0.25 ug/well of lipid complexed with 25 nM siNA. A screen of siNA constructs comprising ribonucleotides and 3′-terminal dithymidine caps was compared to untreated cells, scrambled siNA control constructs (Scram1 and Scram2), and cells transfected with lipid alone (transfection control). As shown in the figure, all of the siNA constructs significantly reduce ERG2 RNA expression.

[0286] FIG. 24 shows a non-limiting example of reduction of ERG2 mRNA in HeLa cells mediated by siNAs that target ERG2 mRNA. HeLa cells were transfected with 0.25 ug/well of lipid complexed with 25 nM siNA. Chemically modified siNA constructs (see Table III) comprising Stab 9/22 chemistry (see Table 1) were compared to untreated cells, a matched chemistry irrelevant siNA control construct (IC), and cells transfected with lipid alone (transfection control). As shown in the figure, the siNA constructs significantly reduce ERG2 RNA expression.

### DETAILED DESCRIPTION OF THE INVENTION

[0287] Mechanism of Action of Nucleic Acid Molecules of the Invention The discussion that follows discusses the proposed mechanism of RNA interference mediated by short interfering RNA as is presently known, and is not meant to be limiting and is not an admission of prior art. Applicant demonstrates herein that chemically-modified short interfering nucleic acids possess similar or improved capacity to mediate RNAi as do siRNA molecules and are expected to possess improved stability and activity in vivo; therefore, this discussion is not meant to be limiting only to siRNA and can be applied to siNA as a whole. By “improved capacity to mediate RNAi” or “improved RNAi activity” is meant to include RNAi activity measured in vitro and/or in vivo where the RNAi activity is a reflection of both the ability of the siNA to mediate RNAi and the stability of the siNAs of the invention. In this invention, the product of these activities can be increased in vitro and/or in vivo compared to an all RNA siRNA or a siNA containing a plurality of ribonucleotides. In some cases, the activity or stability of the siNA molecule can be decreased (i.e., less than ten-fold), but the overall activity of the siNA molecule is enhanced in vitro and/or in vivo.

[0288] RNA interference refers to the process of sequence specific post-transcriptional gene silencing in animals mediated by short interfering RNAs (siRNAs) (Fire et al., 1998, Nature, 391, 806). The corresponding process in plants is commonly referred to as post-transcriptional gene silencing or RNA silencing and is also referred to as quelling in fungi. The process of post-transcriptional gene silencing is thought to be an evolutionarily-conserved cellular defense mechanism used to prevent the expression of foreign genes which is commonly shared by diverse flora and phyla (Fire et al., 1999, Trends Genet., 15, 358). Such protection from foreign gene expression may have evolved in response to the production of double-stranded RNAs (dsRNAs) derived from viral infection or the random integration of transposon elements into a host genome via a cellular response that specifically destroys homologous single-stranded RNA or viral genomic RNA. The presence of dsRNA in cells triggers the RNAi response though a mechanism that has yet to be fully characterized. This mechanism appears to be different from the interferon response that results from dsRNA-mediated activation of protein kinase PKR and 2′,5′-oligoadenylate synthetase resulting in non-specific cleavage of mRNA by ribonuclease L.

[0289] The presence of long dsRNAs in cells stimulates the activity of a ribonuclease III enzyme referred to as Dicer. Dicer is involved in the processing of the dsRNA into short pieces of dsRNA known as short interfering RNAs (siRNAs) (Berstein et al., 2001, Nature, 409, 363). Short interfering RNAs derived from Dicer activity are typically about 21 to about 23 nucleotides in length and comprise about 19 base pair duplexes. Dicer has also been implicated in the excision of 21- and 22-nucleotide small temporal RNAs (stRNAs) from precursor RNA of conserved structure that are implicated in translational control (Hutvagner et al., 2001, Science, 293, 834). The RNAi response also features an endonuclease complex containing a siRNA, commonly referred to as an RNA-induced silencing complex (RISC), which mediates cleavage of single-stranded RNA having sequence homologous to the siRNA. Cleavage of the target RNA takes place in the middle of the region complementary to the guide sequence of the siRNA duplex (Elbashir et al., 2001, Genes Dev., 15, 188). In addition, RNA interference can also involve small RNA (e.g., micro-RNA or mRNA) mediated gene silencing, presumably though cellular mechanisms that regulate chromatin structure and thereby prevent transcription of target gene sequences (see for example Allshire, 2002, Science, 297, 1818-1819; Volpe et al., 2002, Science, 297, 1833-1837; Jenuwein, 2002, Science, 297, 2215-2218; and Hall et al., 2002, Science, 297, 2232-2237). As such, siNA molecules of the invention can be used to mediate gene silencing via interaction with RNA transcripts or alternately by interaction with particular gene sequences, wherein such interaction results in gene silencing either at the transcriptional level or post-transcriptional level.

[0290] RNAi has been studied in a variety of systems. Fire et al., 1998, Nature, 391, 806, were the first to observe RNAi in C. elegans. Wianny and Goetz, 1999, Nature Cell Biol., 2, 70, describe RNAi mediated by dsRNA in mouse embryos. Hammond et al., 2000, Nature, 404, 293, describe RNAi in Drosophila cells transfected with dsRNA. Elbashir et al., 2001, Nature, 411, 494, describe RNAi induced by introduction of duplexes of synthetic 21-nucleotide RNAs in cultured mammalian cells including human embryonic kidney and HeLa cells. Recent work in Drosophila embryonic lysates has revealed certain requirements for siRNA length, structure, chemical composition, and sequence that are essential to mediate efficient RNAi activity. These studies have shown that 21 nucleotide siRNA duplexes are most active when containing two 2-nucleotide 3′-terminal nucleotide overhangs. Furthermore, substitution of one or both siRNA strands with 2′-deoxy or 2′-O-methyl nucleotides abolishes RNAi activity, whereas substitution of 3′-terminal siRNA nucleotides with deoxy nucleotides was shown to be tolerated. Mismatch sequences in the center of the siRNA duplex were also shown to abolish RNAi activity. In addition, these studies also indicate that the position of the cleavage site in the target RNA is defined by the 5′-end of the siRNA guide sequence rather than the 3′-end (Elbashir et al., 2001, EMBO J, 20, 6877). Other studies have indicated that a 5′-phosphate on the target-complementary strand of a siRNA duplex is required for siRNA activity and that ATP is utilized to maintain the 5′-phosphate moiety on the siRNA (Nykanen et al., 2001, Cell, 107, 309); however, siRNA molecules lacking a 5′-phosphate are active when introduced exogenously, suggesting that 5′-phosphorylation of siRNA constructs may occur in vivo.

Synthesis of Nucleic Acid Molecules

[0291] Synthesis of nucleic acids greater than 100 nucleotides in length is difficult using automated methods, and the therapeutic cost of such molecules is prohibitive. In this invention, small nucleic acid motifs (“small” refers to nucleic acid motifs no more than 100 nucleotides in length, preferably no more than 80 nucleotides in length, and most preferably no more than 50 nucleotides in length; e.g., individual siNA oligonucleotide sequences or siNA sequences synthesized in tandem) are preferably used for exogenous delivery. The simple structure of these molecules increases the ability of the nucleic acid to invade targeted regions of protein and/or RNA structure. Exemplary molecules of the instant invention are chemically synthesized, and others can similarly be synthesized.

[0292] Oligonucleotides (e.g., certain modified oligonucleotides or portions of oligonucleotides lacking ribonucleotides) are synthesized using protocols known in the art, for example as described in Caruthers et al., 1992, Methods in Enzymology 211, 3-19, Thompson et al., International PCT Publication No. WO 99/54459, Wincott et al., 1995, Nucleic Acids Res. 23, 2677-2684, Wincott et al., 1997, Methods Mol. Bio., 74, 59, Brennan et al., 1998, Biotechnol Bioeng., 61, 33-45, and Brennan, U.S. Pat. No. 6,001,311. All of these references are incorporated herein by reference. The synthesis of oligonucleotides makes use of common nucleic acid protecting and coupling groups, such as dimethoxytrityl at the 5′-end, and phosphoramidites at the 3′-end. In a non-limiting example, small scale syntheses are conducted on a 394 Applied Biosystems, Inc. synthesizer using a 0.2 mmol scale protocol with a 2.5 min coupling step for 2′-O-methylated nucleotides and a 45 second coupling step for 2′-deoxy nucleotides or 2′-deoxy-2′-fluoro nucleotides. Table V outlines the amounts and the contact times of the reagents used in the synthesis cycle. Alternatively, syntheses at the 0.2 μmol scale can be performed on a 96-well plate synthesizer, such as the instrument produced by Protogene (Palo Alto, Calif.) with minimal modification to the cycle. A 33-fold excess (60 μL of 0.11 M=6.6 μmol) of 2′-O-methyl phosphoramidite and a 105-fold excess of S-ethyl tetrazole (60 μL of 0.25 M=15 μmol) can be used in each coupling cycle of 2′-O-methyl residues relative to polymer-bound 5′-hydroxyl. A 22-fold excess (40 μL of 0.11 M=4.4 μmol) of deoxy phosphoramidite and a 70-fold excess of S-ethyl tetrazole (40 μL of 0.25 M=10 μmol) can be used in each coupling cycle of deoxy residues relative to polymer-bound 5′-hydroxyl. Average coupling yields on the 394 Applied Biosystems, Inc. synthesizer, determined by colorimetric quantitation of the trityl fractions, are typically 97.5-99%. Other oligonucleotide synthesis reagents for the 394 Applied Biosystems, Inc. synthesizer include the following: detritylation solution is 3% TCA in methylene chloride (ABI); capping is performed with 16% N-methyl imidazole in THF (ABI) and 10% acetic anhydride/10% 2,6-lutidine in THF (ABI); and oxidation solution is 16.9 mM I₂, 49 mM pyridine, 9% water in THF (PerSeptive Biosystems, Inc.). Burdick & Jackson Synthesis Grade acetonitrile is used directly from the reagent bottle. S-Ethyltetrazole solution (0.25 M in acetonitrile) is made up from the solid obtained from American International Chemical, Inc. Alternately, for the introduction of phosphorothioate linkages, Beaucage reagent (3H-1,2-Benzodithiol-3-one 1,1-dioxide, 0.05 M in acetonitrile) is used.

[0293] Deprotection of the DNA-based oligonucleotides is performed as follows: the polymer-bound trityl-on oligoribonucleotide is transferred to a 4 mL glass screw top vial and suspended in a solution of 40% aqueous methylamine (1 mL) at 65° C. for 10 minutes. After cooling to −20° C., the supernatant is removed from the polymer support. The support is washed three times with 1.0 mL of EtOH:MeCN:H₂O/3:1:1, vortexed and the supernatant is then added to the first supernatant. The combined supernatants, containing the oligoribonucleotide, are dried to a white powder.

[0294] The method of synthesis used for RNA including certain siNA molecules of the invention follows the procedure as described in Usman et al., 1987, J. Am. Chem. Soc., 109, 7845; Scaringe et al., 1990, Nucleic Acids Res., 18, 5433; and Wincott et al., 1995, Nucleic Acids Res. 23, 2677-2684 Wincott et al., 1997, Methods Mol. Bio., 74, 59, and makes use of common nucleic acid protecting and coupling groups, such as dimethoxytrityl at the 5′-end, and phosphoramidites at the 3′-end. In a non-limiting example, small scale syntheses are conducted on a 394 Applied Biosystems, Inc. synthesizer using a 0.2 μmol scale protocol with a 7.5 min coupling step for alkylsilyl protected nucleotides and a 2.5 min coupling step for 2′-O-methylated nucleotides. Table V outlines the amounts and the contact times of the reagents used in the synthesis cycle. Alternatively, syntheses at the 0.2 μmol scale can be done on a 96-well plate synthesizer, such as the instrument produced by Protogene (Palo Alto, Calif.) with minimal modification to the cycle. A 33-fold excess (60 μL of 0.11 M=6.6 mmol) of 2′-O-methyl phosphoramidite and a 75-fold excess of S-ethyl tetrazole (60 μL of 0.25 M=15 μmol) can be used in each coupling cycle of 2′-O-methyl residues relative to polymer-bound 5′-hydroxyl. A 66-fold excess (120 μL of 0.11 M=13.2 μmol) of alkylsilyl (ribo) protected phosphoramidite and a 150-fold excess of S-ethyl tetrazole (120 μL of 0.25 M=30 μmol) can be used in each coupling cycle of ribo residues relative to polymer-bound 5′-hydroxyl. Average coupling yields on the 394 Applied Biosystems, Inc. synthesizer, determined by colorimetric quantitation of the trityl fractions, are typically 97.5-99%. Other oligonucleotide synthesis reagents for the 394 Applied Biosystems, Inc. synthesizer include the following: detritylation solution is 3% TCA in methylene chloride (ABI); capping is performed with 16% N-methyl imidazole in THF (ABI) and 10% acetic anhydride/10% 2,6-lutidine in THF (ABI); oxidation solution is 16.9 mM I₂, 49 mM pyridine, 9% water in THF (PerSeptive Biosystems, Inc.). Burdick & Jackson Synthesis Grade acetonitrile is used directly from the reagent bottle. S-Ethyltetrazole solution (0.25 M in acetonitrile) is made up from the solid obtained from American International Chemical, Inc. Alternately, for the introduction of phosphorothioate linkages, Beaucage reagent (3H-1,2-Benzodithiol-3-one 1,1-dioxide0.05 M in acetonitrile) is used.

[0295] Deprotection of the RNA is performed using either a two-pot or one-pot protocol. For the two-pot protocol, the polymer-bound trityl-on oligoribonucleotide is transferred to a 4 mL glass screw top vial and suspended in a solution of 40% aq. methylamine (1 mL) at 65° C. for 10 min. After cooling to −20° C., the supernatant is removed from the polymer support. The support is washed three times with 1.0 mL of EtOH:MeCN:H2O/3:1:1, vortexed and the supernatant is then added to the first supernatant. The combined supernatants, containing the oligoribonucleotide, are dried to a white powder. The base deprotected oligoribonucleotide is resuspended in anhydrous TEA/HF/NMP solution (300 μL of a solution of 1.5 mL N-methylpyrrolidinone, 750 μL TEA and 1 mL TEA.3HF to provide a 1.4 M HF concentration) and heated to 65° C. After 1.5 h, the oligomer is quenched with 1.5 M NH₄HCO₃.

[0296] Alternatively, for the one-pot protocol, the polymer-bound trityl-on oligoribonucleotide is transferred to a 4 mL glass screw top vial and suspended in a solution of 33% ethanolic methylamine/DMSO: 1/1 (0.8 mL) at 65° C. for 15 minutes. The vial is brought to room temperature TEA.3HF (0.1 mL) is added and the vial is heated at 65° C. for 15 minutes. The sample is cooled at −20° C. and then quenched with 1.5 M NH₄HCO₃.

[0297] For purification of the trityl-on oligomers, the quenched NH₄HCO₃ solution is loaded onto a C-18 containing cartridge that had been prewashed with acetonitrile followed by 50 mM TEAA. After washing the loaded cartridge with water, the RNA is detritylated with 0.5% TFA for 13 minutes. The cartridge is then washed again with water, salt exchanged with 1 M NaCl and washed with water again. The oligonucleotide is then eluted with 30% acetonitrile.

[0298] The average stepwise coupling yields are typically>98% (Wincott et al., 1995 Nucleic Acids Res. 23, 2677-2684). Those of ordinary skill in the art will recognize that the scale of synthesis can be adapted to be larger or smaller than the example described above including but not limited to 96-well format.

[0299] Alternatively, the nucleic acid molecules of the present invention can be synthesized separately and joined together post-synthetically, for example, by ligation (Moore et al., 1992, Science 256, 9923; Draper et al., International PCT publication No. WO 93/23569; Shabarova et al., 1991, Nucleic Acids Research 19, 4247; Bellon et al., 1997, Nucleosides & Nucleotides, 16, 951; Bellon et al., 1997, Bioconjugate Chem. 8, 204), or by hybridization following synthesis and/or deprotection.

[0300] The siNA molecules of the invention can also be synthesized via a tandem synthesis methodology as described in Example 1 herein, wherein both siNA strands are synthesized as a single contiguous oligonucleotide fragment or strand separated by a cleavable linker which is subsequently cleaved to provide separate siNA fragments or strands that hybridize and permit purification of the siNA duplex. The linker can be a polynucleotide linker or a non-nucleotide linker. The tandem synthesis of siNA as described herein can be readily adapted to both multiwell/multiplate synthesis platforms such as 96 well or similarly larger multi-well platforms. The tandem synthesis of siNA as described herein can also be readily adapted to large scale synthesis platforms employing batch reactors, synthesis columns and the like.

[0301] A siNA molecule can also be assembled from two distinct nucleic acid strands or fragments wherein one fragment includes the sense region and the second fragment includes the antisense region of the RNA molecule.

[0302] The nucleic acid molecules of the present invention can be modified extensively to enhance stability by modification with nuclease resistant groups, for example, 2′-amino, 2′-C-allyl, 2′-fluoro, 2′-O-methyl, 2′-H (for a review see Usman and Cedergren, 1992, TIBS 17, 34; Usman et al., 1994, Nucleic Acids Symp. Ser. 31, 163). siNA constructs can be purified by gel electrophoresis using general methods or can be purified by high pressure liquid chromatography (HPLC; see Wincott et al., supra, the totality of which is hereby incorporated herein by reference) and re-suspended in water.

[0303] In another aspect of the invention, siNA molecules of the invention are expressed from transcription units inserted into DNA or RNA vectors. The recombinant vectors can be DNA plasmids or viral vectors. siNA expressing viral vectors can be constructed based on, but not limited to, adeno-associated virus, retrovirus, adenovirus, or alphavirus. The recombinant vectors capable of expressing the siNA molecules can be delivered as described herein, and persist in target cells. Alternatively, viral vectors can be used that provide for transient expression of siNA molecules. Optimizing Activity of the nucleic acid molecule of the invention.

[0304] Chemically synthesizing nucleic acid molecules with modifications (base, sugar and/or phosphate) can prevent their degradation by serum ribonucleases, which can increase their potency (see e.g., Eckstein et al., International Publication No. WO 92/07065; Perrault et al., 1990 Nature 344, 565; Pieken et al., 1991, Science 253, 314; Usman and Cedergren, 1992, Trends in Biochem. Sci. 17, 334; Usman et al., International Publication No. WO 93/15187; and Rossi et al., International Publication No. WO 91/03162; Sproat, U.S. Pat. No. 5,334,711; Gold et al., U.S. Pat. No. 6,300,074; and Burgin et al., supra; all of which are incorporated by reference herein). All of the above references describe various chemical modifications that can be made to the base, phosphate and/or sugar moieties of the nucleic acid molecules described herein. Modifications that enhance their efficacy in cells, and removal of bases from nucleic acid molecules to shorten oligonucleotide synthesis times and reduce chemical requirements are desired.

[0305] There are several examples in the art describing sugar, base and phosphate modifications that can be introduced into nucleic acid molecules with significant enhancement in their nuclease stability and efficacy. For example, oligonucleotides are modified to enhance stability and/or enhance biological activity by modification with nuclease resistant groups, for example, 2′-amino, 2′-C-allyl, 2′-fluoro, 2′-O-methyl, 2′-O-allyl, 2′-H, nucleotide base modifications (for a review see Usman and Cedergren, 1992, TIBS. 17, 34; Usman et al., 1994, Nucleic Acids Symp. Ser. 31, 163; Burgin et al., 1996, Biochemistry, 35, 14090). Sugar modification of nucleic acid molecules have been extensively described in the art (see Eckstein et al., International Publication PCT No. WO 92/07065; Perrault et al. Nature, 1990, 344, 565-568; Pieken et al. Science, 1991, 253, 314-317; Usman and Cedergren, Trends in Biochem. Sci., 1992, 17, 334-339; Usman et al. International Publication PCT No. WO 93/15187; Sproat, U.S. Pat. No. 5,334,711 and Beigelman et al., 1995, J. Biol. Chem., 270, 25702; Beigelman et al., International PCT publication No. WO 97/26270; Beigelman et al., U.S. Pat. No. 5,716,824; Usman et al., U.S. Pat. No. 5,627,053; Woolf et al., International PCT Publication No. WO 98/13526; Thompson et al., U.S. Ser. No. 60/082,404 which was filed on Apr. 20, 1998; Karpeisky et al., 1998, Tetrahedron Lett., 39, 1131; Earnshaw and Gait, 1998, Biopolymers (Nucleic Acid Sciences), 48, 39-55; Verma and Eckstein, 1998, Annu. Rev. Biochem., 67, 99-134; and Burlina et al., 1997, Bioorg. Med. Chem., 5, 1999-2010; all of the references are hereby incorporated in their totality by reference herein). Such publications describe general methods and strategies to determine the location of incorporation of sugar, base and/or phosphate modifications and the like into nucleic acid molecules without modulating catalysis, and are incorporated by reference herein. In view of such teachings, similar modifications can be used as described herein to modify the siNA nucleic acid molecules of the instant invention so long as the ability of siNA to promote RNAi is cells is not significantly inhibited.

[0306] While chemical modification of oligonucleotide internucleotide linkages with phosphorothioate, phosphorodithioate, and/or 5′-methylphosphonate linkages improves stability, excessive modifications can cause some toxicity or decreased activity. Therefore, when designing nucleic acid molecules, the amount of these internucleotide linkages should be minimized. The reduction in the concentration of these linkages should lower toxicity, resulting in increased efficacy and higher specificity of these molecules.

[0307] Short interfering nucleic acid (siNA) molecules having chemical modifications that maintain or enhance activity are provided. Such a nucleic acid is also generally more resistant to nucleases than an unmodified nucleic acid Accordingly, the in vitro and/or in vivo activity should not be significantly lowered. In cases in which modulation is the goal, therapeutic nucleic acid molecules delivered exogenously should optimally be stable within cells until translation of the target RNA has been modulated long enough to reduce the levels of the undesirable protein. This period of time varies between hours to days depending upon the disease state. Improvements in the chemical synthesis of RNA and DNA (Wincott et al., 1995, Nucleic Acids Res. 23, 2677; Caruthers et al., 1992, Methods in Enzymology 211, 3-19 (incorporated by reference herein)) have expanded the ability to modify nucleic acid molecules by introducing nucleotide modifications to enhance their nuclease stability, as described above.

[0308] In one embodiment, nucleic acid molecules of the invention include one or more (e.g., about 1, 2, 3, 4, 5, 6, 7, 8, 9, 10, or more) G-clamp nucleotides. A G-clamp nucleotide is a modified cytosine analog wherein the modifications confer the ability to hydrogen bond both Watson-Crick and Hoogsteen faces of a complementary guanine within a duplex, see for example Lin and Matteucci, 1998, J. Am. Chem. Soc., 120, 8531-8532. A single G-clamp analog substitution within an oligonucleotide can result in substantially enhanced helical thermal stability and mismatch discrimination when hybridized to complementary oligonucleotides. The inclusion of such nucleotides in nucleic acid molecules of the invention results in both enhanced affinity and specificity to nucleic acid targets, complementary sequences, or template strands. In another embodiment, nucleic acid molecules of the invention include one or more (e.g., about 1, 2, 3, 4, 5, 6, 7, 8, 9, 10, or more) LNA “locked nucleic acid” nucleotides such as a 2′,4′-C methylene bicyclo nucleotide (see for example Wengel et al., International PCT Publication No. WO 00/66604 and WO 99/14226).

[0309] In another embodiment, the invention features conjugates and/or complexes of siNA molecules of the invention. Such conjugates and/or complexes can be used to facilitate delivery of siNA molecules into a biological system, such as a cell. The conjugates and complexes provided by the instant invention can impart therapeutic activity by transferring therapeutic compounds across cellular membranes, altering the pharmacokinetics, and/or modulating the localization of nucleic acid molecules of the invention. The present invention encompasses the design and synthesis of novel conjugates and complexes for the delivery of molecules, including, but not limited to, small molecules, lipids, cholesterol, phospholipids, nucleosides, nucleotides, nucleic acids, antibodies, toxins, negatively charged polymers and other polymers, for example proteins, peptides, hormones, carbohydrates, polyethylene glycols, or polyamines, across cellular membranes. In general, the transporters described are designed to be used either individually or as part of a multi-component system, with or without degradable linkers. These compounds are expected to improve delivery and/or localization of nucleic acid molecules of the invention into a number of cell types originating from different tissues, in the presence or absence of serum (see Sullenger and Cech, U.S. Pat. No. 5,854,038). Conjugates of the molecules described herein can be attached to biologically active molecules via linkers that are biodegradable, such as biodegradable nucleic acid linker molecules.

[0310] The term “biodegradable linker” as used herein, refers to a nucleic acid or non-nucleic acid linker molecule that is designed as a biodegradable linker to connect one molecule to another molecule, for example, a biologically active molecule to a siNA molecule of the invention or the sense and antisense strands of a siNA molecule of the invention. The biodegradable linker is designed such that its stability can be modulated for a particular purpose, such as delivery to a particular tissue or cell type. The stability of a nucleic acid-based biodegradable linker molecule can be modulated by using various chemistries, for example combinations of ribonucleotides, deoxyribonucleotides, and chemically-modified nucleotides, such as 2′-O-methyl, 2′-fluoro, 2′-amino, 2′-O-amino, 2′-C-allyl, 2′-O-allyl, and other 2′-modified or base modified nucleotides. The biodegradable nucleic acid linker molecule can be a dimer, trimer, tetramer or longer nucleic acid molecule, for example, an oligonucleotide of about 2, 3, 4, 5, 6, 7, 8, 9, 10, 11, 12, 13, 14, 15, 16, 17, 18, 19, or 20 nucleotides in length, or can comprise a single nucleotide with a phosphorus-based linkage, for example, a phosphoramidate or phosphodiester linkage. The biodegradable nucleic acid linker molecule can also comprise nucleic acid backbone, nucleic acid sugar, or nucleic acid base modifications.

[0311] The term “biodegradable” as used herein, refers to degradation in a biological system, for example, enzymatic degradation or chemical degradation.

[0312] The term “biologically active molecule” as used herein refers to compounds or molecules that are capable of eliciting or modifying a biological response in a system. Non-limiting examples of biologically active siNA molecules either alone or in combination with other molecules contemplated by the instant invention include therapeutically active molecules such as antibodies, cholesterol, hormones, antivirals, peptides, proteins, chemotherapeutics, small molecules, vitamins, co-factors, nucleosides, nucleotides, oligonucleotides, enzymatic nucleic acids, antisense nucleic acids, triplex forming oligonucleotides, 2,5-A chimeras, siNA, dsRNA, allozymes, aptamers, decoys and analogs thereof. Biologically active molecules of the invention also include molecules capable of modulating the pharmacokinetics and/or pharmacodynamics of other biologically active molecules, for example, lipids and polymers such as polyamines, polyamides, polyethylene glycol and other polyethers.

[0313] The term “phospholipid” as used herein, refers to a hydrophobic molecule comprising at least one phosphorus group. For example, a phospholipid can comprise a phosphorus-containing group and saturated or unsaturated alkyl group, optionally substituted with OH, COOH, oxo, amine, or substituted or unsubstituted aryl groups.

[0314] Therapeutic nucleic acid molecules (e.g., siNA molecules) delivered exogenously optimally are stable within cells until reverse transcription of the RNA has been modulated long enough to reduce the levels of the RNA transcript. The nucleic acid molecules are resistant to nucleases in order to function as effective intracellular therapeutic agents. Improvements in the chemical synthesis of nucleic acid molecules described in the instant invention and in the art have expanded the ability to modify nucleic acid molecules by introducing nucleotide modifications to enhance their nuclease stability as described above.

[0315] In yet another embodiment, siNA molecules having chemical modifications that maintain or enhance enzymatic activity of proteins involved in RNAi are provided. Such nucleic acids are also generally more resistant to nucleases than unmodified nucleic acids. Thus, in vitro and/or in vivo the activity should not be significantly lowered.

[0316] Use of the nucleic acid-based molecules of the invention will lead to better treatments by affording the possibility of combination therapies (e.g., multiple siNA molecules targeted to different genes; nucleic acid molecules coupled with known small molecule modulators; or intermittent treatment with combinations of molecules, including different motifs and/or other chemical or biological molecules). The treatment of subjects with siNA molecules can also include combinations of different types of nucleic acid molecules, such as enzymatic nucleic acid molecules (ribozymes), allozymes, antisense, 2,5-A oligoadenylate, decoys, and aptamers.

[0317] In another aspect a siNA molecule of the invention comprises one or more 5′ and/or a 3′-cap structure, for example, on only the sense siNA strand, the antisense siNA strand, or both siNA strands.

[0318] By “cap structure” is meant chemical modifications, which have been incorporated at either terminus of the oligonucleotide (see, for example, Adamic et al., U.S. Pat. No. 5,998,203, incorporated by reference herein). These terminal modifications protect the nucleic acid molecule from exonuclease degradation, and may help in delivery and/or localization within a cell. The cap may be present at the 5′-terminus (5′-cap) or at the 3′-terminal (3′-cap) or may be present on both termini. In non-limiting examples, the 5′-cap includes, but is not limited to, glyceryl, inverted deoxy abasic residue (moiety); 4′,5′-methylene nucleotide; 1-(beta-D-erythrofuranosyl) nucleotide, 4′-thio nucleotide; carbocyclic nucleotide; 1,5-anhydrohexitol nucleotide; L-nucleotides; alpha-nucleotides; modified base nucleotide; phosphorodithioate linkage; threo-pentofuranosyl nucleotide; acyclic 3′,4′-seco nucleotide; acyclic 3,4-dihydroxybutyl nucleotide; acyclic 3,5-dihydroxypentyl nucleotide, 3′-3′-inverted nucleotide moiety; 3′-3′-inverted abasic moiety; 3′-2′-inverted nucleotide moiety; 3′-2′-inverted abasic moiety; 1,4-butanediol phosphate; 3′-phosphoramidate; hexylphosphate; aminohexyl phosphate; 3′-phosphate; 3′-phosphorothioate; phosphorodithioate; or bridging or non-bridging methylphosphonate moiety. Non-limiting examples of cap moieties are shown in FIG. 10.

[0319] Non-limiting examples of the 3′-cap include, but are not limited to, glyceryl, inverted deoxy abasic residue (moiety), 4′,5′-methylene nucleotide; I-(beta-D-erythrofuranosyl) nucleotide; 4′-thio nucleotide, carbocyclic nucleotide; 5′-amino-alkyl phosphate; 1,3-diamino-2-propyl phosphate; 3-aminopropyl phosphate; 6-aminohexyl phosphate; 1,2-aminododecyl phosphate; hydroxypropyl phosphate; 1,5-anhydrohexitol nucleotide; L-nucleotide; alpha-nucleotide; modified base nucleotide; phosphorodithioate; threo-pentofuranosyl nucleotide; acyclic 3′,4′-seco nucleotide; 3,4dihydroxybutyl nucleotide; 3,5-dihydroxypentyl nucleotide, 5′-5′-inverted nucleotide moiety; 5′-5′-inverted abasic moiety; 5′-phosphoramidate; 5′-phosphorothioate; 1,4-butanediol phosphate; 5′-amino; bridging and/or non-bridging 5′-phosphoramidate, phosphorothioate and/or phosphorodithioate, bridging or non bridging methylphosphonate and 5′-mercapto moieties (for more details see Beaucage and Iyer, 1993, Tetrahedron 49, 1925; incorporated by reference herein).

[0320] By the term “non-nucleotide” is meant any group or compound which can be incorporated into a nucleic acid chain in the place of one or more nucleotide units, including either sugar and/or phosphate substitutions, and allows the remaining bases to exhibit their enzymatic activity. The group or compound is abasic in that it does not contain a commonly recognized nucleotide base, such as adenosine, guanine, cytosine, uracil or thymine and therefore lacks a base at the 1′-position.

[0321] An “alkyl” group refers to a saturated aliphatic hydrocarbon, including straight-chain, branched-chain, and cyclic alkyl groups. Preferably, the alkyl group has 1 to 12 carbons. More preferably, it is a lower alkyl of from 1 to 7 carbons, more preferably 1 to 4 carbons. The alkyl group can be substituted or unsubstituted. When substituted the substituted group(s) is preferably, hydroxyl, cyano, alkoxy, ═O, ═S, NO₂ or N(CH3)₂, amino, or SH. The term also includes alkenyl groups that are unsaturated hydrocarbon groups containing at least one carbon-carbon double bond, including straight-chain, branched-chain, and cyclic groups. Preferably, the alkenyl group has 1 to 12 carbons. More preferably, it is a lower alkenyl of from 1 to 7 carbons, more preferably 1 to 4 carbons. The alkenyl group may be substituted or unsubstituted. When substituted the substituted group(s) is preferably, hydroxyl, cyano, alkoxy, ═O, ═S, NO₂, halogen, N(CH3)₂, amino, or SH. The term “alkyl” also includes alkynyl groups that have an unsaturated hydrocarbon group containing at least one carbon-carbon triple bond, including straight-chain, branched-chain, and cyclic groups. Preferably, the alkynyl group has 1 to 12 carbons. More preferably, it is a lower alkynyl of from 1 to 7 carbons, more preferably 1 to 4 carbons. The alkynyl group may be substituted or unsubstituted. When substituted the substituted group(s) is preferably, hydroxyl, cyano, alkoxy, ═O, ═S, NO₂ or N(CH3)₂, amino or SH.

[0322] Such alkyl groups can also include aryl, alkylaryl, carbocyclic aryl, heterocyclic aryl, amide and ester groups. An “aryl” group refers to an aromatic group that has at least one ring having a conjugated pi electron system and includes carbocyclic aryl, heterocyclic aryl and biaryl groups, all of which may be optionally substituted. The preferred substituent(s) of aryl groups are halogen, trihalomethyl, hydroxyl, SH, OH, cyano, alkoxy, alkyl, alkenyl, alkynyl, and amino groups. An “alkylaryl” group refers to an alkyl group (as described above) covalently joined to an aryl group (as described above). Carbocyclic aryl groups are groups wherein the ring atoms on the aromatic ring are all carbon atoms. The carbon atoms are optionally substituted. Heterocyclic aryl groups are groups having from 1 to 3 heteroatoms as ring atoms in the aromatic ring and the remainder of the ring atoms are carbon atoms. Suitable heteroatoms include oxygen, sulfur, and nitrogen, and include furanyl, thienyl, pyridyl, pyrrolyl, N-lower alkyl pyrrolo, pyrimidyl, pyrazinyl, imidazolyl and the like, all optionally substituted. An “amide” refers to an —C(O)—NH—R, where R is either alkyl, aryl, alkylaryl or hydrogen. An “ester” refers to an —C(O)—OR′, where R is either alkyl, aryl, alkylaryl or hydrogen.

[0323] By “nucleotide” as used herein is as recognized in the art to include natural bases (standard), and modified bases well known in the art. Such bases are generally located at the 1′ position of a nucleotide sugar moiety. Nucleotides generally comprise a base, sugar and a phosphate group. The nucleotides can be unmodified or modified at the sugar, phosphate and/or base moiety, (also referred to interchangeably as nucleotide analogs, modified nucleotides, non-natural nucleotides, non-standard nucleotides and other; see, for example, Usman and McSwiggen, supra; Eckstein et al., International PCT Publication No. WO 92/07065; Usman et al., International PCT Publication No. WO 93/15187; Ulhlman & Peyman, supra, all are hereby incorporated by reference herein). There are several examples of modified nucleic acid bases known in the art as summarized by Limbach et al., 1994, Nucleic Acids Res. 22, 2183. Some of the non-limiting examples of base modifications that can be introduced into nucleic acid molecules include, inosine, purine, pyridin-4-one, pyridin-2-one, phenyl, pseudouracil, 2, 4, 6-trimethoxy benzene, 3-methyl uracil, dihydrouridine, naphthyl, aminophenyl, 5-alkylcytidines (e.g., 5-methylcytidine), 5-alkyluridines (e.g., ribothymidine), 5-halouridine (e.g., 5-bromouridine) or 6-azapyrimidines or 6-alkylpyrimidines (e.g. 6-methyluridine), propyne, and others (Burgin et al., 1996, Biochemistry, 35, 14090; Uhlman & Peyman, supra). By “modified bases” in this aspect is meant nucleotide bases other than adenine, guanine, cytosine and uracil at 1′ position or their equivalents.

[0324] In one embodiment, the invention features modified siNA molecules, with phosphate backbone modifications comprising one or more phosphorothioate, phosphorodithioate, methylphosphonate, phosphotriester, morpholino, amidate carbamate, carboxymethyl, acetamidate, polyamide, sulfonate, sulfonamide, sulfamate, formacetal, thioformacetal, and/or alkylsilyl, substitutions. For a review of oligonucleotide backbone modifications, see Hunziker and Leumann, 1995, Nucleic Acid Analogues: Synthesis and Properties, in Modern Synthetic Methods, VCH, 331-417, and Mesmaeker et al., 1994, Novel Backbone Replacements for Oligonucleotides, in Carbohydrate Modifications in Antisense Research, ACS, 24-39.

[0325] By “abasic” is meant sugar moieties lacking a base or having other chemical groups in place of a base at the 1′ position, see for example Adamic et al., U.S. Pat. No. 5,998,203.

[0326] By “unmodified nucleoside” is meant one of the bases adenine, cytosine, guanine, thymine, or uracil joined to the 1′ carbon of β-D-ribo-furanose.

[0327] By “modified nucleoside” is meant any nucleotide base which contains a modification in the chemical structure of an unmodified nucleotide base, sugar and/or phosphate. Non-limiting examples of modified nucleotides are shown by Formulae I-VII and/or other modifications described herein.

[0328] In connection with 2′-modified nucleotides as described for the present invention, by “amino” is meant 2′-NH₂ or 2′-O—NH2, which can be modified or unmodified. Such modified groups are described, for example, in Eckstein et al., U.S. Pat. No. 5,672,695 and Matulic-Adamic et al., U.S. Pat. No. 6,248,878, which are both incorporated by reference in their entireties.

[0329] Various modifications to nucleic acid siNA structure can be made to enhance the utility of these molecules. Such modifications will enhance shelf-life, half-life in vitro, stability, and ease of introduction of such oligonucleotides to the target site, e.g., to enhance penetration of cellular membranes, and confer the ability to recognize and bind to targeted cells.

Administration of Nucleic Acid Molecules

[0330] A siNA molecule of the invention can be adapted for use to prevent or treat cancer, including cancers of the lung, colon, breast, prostate, and cervix, lymphoma, Ewing's sarcoma and related tumors, melanoma, angiogenic disease states such as tumor angiogenesis, leukemia (including acute myeloid leukemia (AML) and CML); diabetic retinopathy; macular degeneration; neovascular glaucoma; myopic degeneration; arthritis (such as rheumatoid arthritis); psoriasis; verruca vulgaris, angiofibroma of tuberous sclerosis; port-wine stains; Sturge Weber syndrome; Kippel-Trenaunay-Weber syndrome; Osler-Weber-rendu symdrome; osteoporosis; and wound healing, or any other trait, disease or condition that is related to or will respond to the levels of BCR-ABL and/or ERG in a cell or tissue, alone or in combination with other therapies. For example, a siNA molecule can comprise a delivery vehicle, including liposomes, for administration to a subject, carriers and diluents and their salts, and/or can be present in pharmaceutically acceptable formulations. Methods for the delivery of nucleic acid molecules are described in Akhtar et al., 1992, Trends Cell Bio., 2, 139; Delivery Strategies for Antisense Oligonucleotide Therapeutics, ed. Akhtar, 1995, Maurer et al., 1999, Mol. Membr. Biol., 16, 129-140; Hofland and Huang, 1999, Handb. Exp. Pharmacol., 137, 165-192; and Lee et al., 2000, ACS Symp. Ser., 752, 184-192, all of which are incorporated herein by reference. Beigelman et al., U.S. Pat. No. 6,395,713 and Sullivan et al., PCT WO 94/02595 further describe the general methods for delivery of nucleic acid molecules. These protocols can be utilized for the delivery of virtually any nucleic acid molecule. Nucleic acid molecules can be administered to cells by a variety of methods known to those of skill in the art, including, but not restricted to, encapsulation in liposomes, by iontophoresis, or by incorporation into other vehicles, such as biodegradable polymers, hydrogels, cyclodextrins (see for example Gonzalez et al., 1999, Bioconjugate Chem., 10, 1068-1074; Wang et al., International PCT publication Nos. WO 03/47518 and WO 03/46185), poly(lactic-co-glycolic)acid (PLGA) and PLCA microspheres (see for example U.S. Pat. No. 6,447,796 and US Patent Application Publication No. U.S. 2002130430), biodegradable nanocapsules, and bioadhesive microspheres, or by proteinaceous vectors (O'Hare and Normand, International PCT Publication No. WO 00/53722). In another embodiment, the nucleic acid molecules of the invention can also be formulated or complexed with polyethyleneimine and derivatives thereof, such as polyethyleneimine-polyethyleneglycol-N-acetylgalactosamine (PEI-PEG-GAL) or polyethyleneimine-polyethyleneglycol-tri-N-acetylgalactosamine (PEI-PEG-triGAL) derivatives. In one embodiment, the nucleic acid molecules of the invention are formulated as described in U.S. Patent Application Publication No. 20030077829, incorporated by reference herein in its entirety.

[0331] In one embodiment, a siNA molecule of the invention is complexed with membrane disruptive agents such as those described in U.S. Patent Application Publication No. 20010007666, incorporated by reference herein in its entirety including the drawings. In another embodiment, the membrane disruptive agent or agents and the siNA molecule are also complexed with a cationic lipid or helper lipid molecule, such as those lipids described in U.S. Pat. No. 6,235,310, incorporated by reference herein in its entirety including the drawings.

[0332] In one embodiment, a siNA molecule of the invention is complexed with delivery systems as described in U.S. Patent Application Publication No. 2003077829 and International PCT Publication Nos. WO 00/03683 and WO 02/087541, all incorporated by reference herein in their entirety including the drawings.

[0333] In one embodiment, delivery systems of the invention include, for example, aqueous and nonaqueous gels, creams, multiple emulsions, microemulsions, liposomes, ointments, aqueous and nonaqueous solutions, lotions, aerosols, hydrocarbon bases and powders, and can contain excipients such as solubilizers, permeation enhancers (e.g., fatty acids, fatty acid esters, fatty alcohols and amino acids), and hydrophilic polymers (e.g., polycarbophil and polyvinylpyrolidone). In one embodiment, the pharmaceutically acceptable carrier is a liposome or a transdermal enhancer. Examples of liposomes which can be used in this invention include the following: (1) CellFectin, 1:1.5 (M/M) liposome formulation of the cationic lipid N,NI,NII,NIII-tetramethyl-N,NI,NII,NIII-tetrapalmit-y-spermine and dioleoyl phosphatidylethanolamine (DOPE) (GIBCO BRL); (2) Cytofectin GSV, 2:1 (MIM) liposome formulation of a cationic lipid and DOPE (Glen Research); (3) DOTAP (N-[1-(2,3-dioleoyloxy)-N,N,N-tri-methyl-ammoniummethylsulfate) (Boehringer Manheim); and (4) Lipofectamine, 3:1 (M/M) liposome formulation of the polycationic lipid DOSPA and the neutral lipid DOPE (GIBCO BRL).

[0334] In one embodiment, delivery systems of the invention include patches, tablets, suppositories, pessaries, gels and creams, and can contain excipients such as solubilizers and enhancers (e.g., propylene glycol, bile salts and amino acids), and other vehicles (e.g., polyethylene glycol, fatty acid esters and derivatives, and hydrophilic polymers such as hydroxypropylmethylcellulose and hyaluronic acid).

[0335] In one embodiment, siNA molecules of the invention are formulated or complexed with polyethylenimine (e.g., linear or branched PEI) and/or polyethylenimine derivatives, including for example grafted PEIs such as galactose PEI, cholesterol PEI, antibody derivatized PEI, and polyethylene glycol PEI (PEG-PEI) derivatives thereof (see for example Ogris et al., 2001, AAPA PharmSci, 3, 1-11; Furgeson et al., 2003, Bioconjugate Chem., 14, 840-847; Kunath et al., 2002, Phramaceutical Research, 19, 810-817; Choi et al., 2001, Bull. Korean Chem. Soc., 22, 46-52; Bettinger et al., 1999, Bioconjugate Chem., 10, 558-561; Peterson et al., 2002, Bioconjugate Chem., 13, 845-854; Erbacher et al., 1999, Journal of Gene Medicine Preprint, 1, 1-18; Godbey et al., 1999., PNAS USA, 96, 5177-5181; Godbey et al., 1999, Journal of Controlled Release, 60, 149-160; Diebold et al., 1999, Journal of Biological Chemistry, 274, 19087-19094; Thomas and Klibanov, 2002, PNAS USA, 99, 14640-14645; and Sagara, U.S. Pat. No. 6,586,524, incorporated by reference herein.

[0336] In one embodiment, a siNA molecule of the invention comprises a bioconjugate, for example a nucleic acid conjugate as described in Vargeese et al., U.S. Ser. No. 10/427,160, filed Apr. 30, 2003; U.S. Pat. No. 6,528,631; U.S. Pat. No. 6,335,434; U.S. Pat. No. 6,235,886; U.S. Pat. No. 6,153,737; U.S. Pat. No. 5,214,136; U.S. Pat. No. 5,138,045, all incorporated by reference herein.

[0337] Thus, the invention features a pharmaceutical composition comprising one or more nucleic acid(s) of the invention in an acceptable carrier, such as a stabilizer, buffer, and the like. The polynucleotides of the invention can be administered (e.g., RNA, DNA or protein) and introduced to a subject by any standard means, with or without stabilizers, buffers, and the like, to form a pharmaceutical composition. When it is desired to use a liposome delivery mechanism, standard protocols for formation of liposomes can be followed. The compositions of the present invention can also be formulated and used as creams, gels, sprays, oils and other suitable compositions for topical, dermal, or transdermal administration as is known in the art.

[0338] The present invention also includes pharmaceutically acceptable formulations of the compounds described. These formulations include salts of the above compounds, e.g., acid addition salts, for example, salts of hydrochloric, hydrobromic, acetic acid, and benzene sulfonic acid.

[0339] A pharmacological composition or formulation refers to a composition or formulation in a form suitable for administration, e.g., systemic or local administration, into a cell or subject, including for example a human. Suitable forms, in part, depend upon the use or the route of entry, for example oral, transdermal, or by injection. Such forms should not prevent the composition or formulation from reaching a target cell (i.e., a cell to which the negatively charged nucleic acid is desirable for delivery). For example, pharmacological compositions injected into the blood stream should be soluble. Other factors are known in the art, and include considerations such as toxicity and forms that prevent the composition or formulation from exerting its effect.

[0340] In one embodiment, siNA molecules of the invention are administered to a subject by systemic administration in a pharmaceutically acceptable composition or formulation. By “systemic administration” is meant in vivo systemic absorption or accumulation of drugs in the blood stream followed by distribution throughout the entire body. Administration routes that lead to systemic absorption include, without limitation: intravenous, subcutaneous, intraperitoneal, inhalation, oral, intrapulmonary and intramuscular. Each of these administration routes exposes the siNA molecules of the invention to an accessible diseased tissue. The rate of entry of a drug into the circulation has been shown to be a function of molecular weight or size. The use of a liposome or other drug carrier comprising the compounds of the instant invention can potentially localize the drug, for example, in certain tissue types, such as the tissues of the reticular endothelial system (RES). A liposome formulation that can facilitate the association of drug with the surface of cells, such as, lymphocytes and macrophages is also useful. This approach can provide enhanced delivery of the drug to target cells by taking advantage of the specificity of macrophage and lymphocyte immune recognition of abnormal cells.

[0341] By “pharmaceutically acceptable formulation” or “pharmaceutically acceptable composition” is meant, a composition or formulation that allows for the effective distribution of the nucleic acid molecules of the instant invention in the physical location most suitable for their desired activity. Non-limiting examples of agents suitable for formulation with the nucleic acid molecules of the instant invention include: P-glycoprotein inhibitors (such as Pluronic P85),; biodegradable polymers, such as poly (DL-lactide-coglycolide) microspheres for sustained release delivery (Emerich, D F et al, 1999, Cell Transplant, 8, 47-58); and loaded nanoparticles, such as those made of polybutylcyanoacrylate. Other non-limiting examples of delivery strategies for the nucleic acid molecules of the instant invention include material described in Boado et al., 1998, J. Pharm. Sci., 87, 1308-1315; Tyler et al., 1999, FEBS Lett., 421, 280-284; Pardridge et al., 1995, PNAS USA., 92, 5592-5596; Boado, 1995, Adv. Drug Delivery Rev., 15, 73-107; Aldrian-Herrada et al., 1998, Nucleic Acids Res., 26, 4910-4916; and Tyler et al., 1999, PNAS USA., 96, 7053-7058.

[0342] The invention also features the use of the composition comprising surface-modified liposomes containing poly (ethylene glycol) lipids (PEG-modified, or long-circulating liposomes or stealth liposomes). These formulations offer a method for increasing the accumulation of drugs in target tissues. This class of drug carriers resists opsonization and elimination by the mononuclear phagocytic system (MPS or RES), thereby enabling longer blood circulation times and enhanced tissue exposure for the encapsulated drug (Lasic et al. Chem. Rev. 1995, 95, 2601-2627; Ishiwata et al., Chem. Pharm. Bull. 1995, 43, 1005-1011). Such liposomes have been shown to accumulate selectively in tumors, presumably by extravasation and capture in the neovascularized target tissues (Lasic et al., Science 1995, 267, 1275-1276; Oku et al., 1995, Biochim. Biophys. Acta, 1238, 86-90). The long-circulating liposomes enhance the pharmacokinetics and pharmacodynamics of DNA and RNA, particularly compared to conventional cationic liposomes which are known to accumulate in tissues of the MPS (Liu et al., J. Biol. Chem. 1995, 42, 24864-24870; Choi et al., International PCT Publication No. WO 96/10391; Ansell et al., International PCT Publication No. WO 96/10390; Holland et al., International PCT Publication No. WO 96/10392). Long-circulating liposomes are also likely to protect drugs from nuclease degradation to a greater extent compared to cationic liposomes, based on their ability to avoid accumulation in metabolically aggressive MPS tissues such as the liver and spleen.

[0343] The present invention also includes compositions prepared for storage or administration that include a pharmaceutically effective amount of the desired compounds in a pharmaceutically acceptable carrier or diluent. Acceptable carriers or diluents for therapeutic use are well known in the pharmaceutical art, and are described, for example, in Remington's Pharmaceutical Sciences, Mack Publishing Co. (A. R. Gennaro edit. 1985), hereby incorporated by reference herein. For example, preservatives, stabilizers, dyes and flavoring agents can be provided. These include sodium benzoate, sorbic acid and esters of p-hydroxybenzoic acid. In addition, antioxidants and suspending agents can be used.

[0344] A pharmaceutically effective dose is that dose required to prevent, inhibit the occurrence, or treat (alleviate a symptom to some extent, preferably all of the symptoms) of a disease state. The pharmaceutically effective dose depends on the type of disease, the composition used, the route of administration, the type of mammal being treated, the physical characteristics of the specific mammal under consideration, concurrent medication, and other factors that those skilled in the medical arts will recognize. Generally, an amount between 0.1 mg/kg and 100 mg/kg body weight/day of active ingredients is administered dependent upon potency of the negatively charged polymer.

[0345] The nucleic acid molecules of the invention and formulations thereof can be administered orally, topically, parenterally, by inhalation or spray, or rectally in dosage unit formulations containing conventional non-toxic pharmaceutically acceptable carriers, adjuvants and/or vehicles. The term parenteral as used herein includes percutaneous, subcutaneous, intravascular (e.g., intravenous), intramuscular, or intrathecal injection or infusion techniques and the like. In addition, there is provided a pharmaceutical formulation comprising a nucleic acid molecule of the invention and a pharmaceutically acceptable carrier. One or more nucleic acid molecules of the invention can be present in association with one or more non-toxic pharmaceutically acceptable carriers and/or diluents and/or adjuvants, and if desired other active ingredients. The pharmaceutical compositions containing nucleic acid molecules of the invention can be in a form suitable for oral use, for example, as tablets, troches, lozenges, aqueous or oily suspensions, dispersible powders or granules, emulsion, hard or soft capsules, or syrups or elixirs.

[0346] Compositions intended for oral use can be prepared according to any method known to the art for the manufacture of pharmaceutical compositions and such compositions can contain one or more such sweetening agents, flavoring agents, coloring agents or preservative agents in order to provide pharmaceutically elegant and palatable preparations. Tablets contain the active ingredient in admixture with non-toxic pharmaceutically acceptable excipients that are suitable for the manufacture of tablets. These excipients can be, for example, inert diluents; such as calcium carbonate, sodium carbonate, lactose, calcium phosphate or sodium phosphate; granulating and disintegrating agents, for example, corn starch, or alginic acid; binding agents, for example starch, gelatin or acacia; and lubricating agents, for example magnesium stearate, stearic acid or talc. The tablets can be uncoated or they can be coated by known techniques. In some cases such coatings can be prepared by known techniques to delay disintegration and absorption in the gastrointestinal tract and thereby provide a sustained action over a longer period. For example, a time delay material such as glyceryl monosterate or glyceryl distearate can be employed.

[0347] Formulations for oral use can also be presented as hard gelatin capsules wherein the active ingredient is mixed with an inert solid diluent, for example, calcium carbonate, calcium phosphate or kaolin, or as soft gelatin capsules wherein the active ingredient is mixed with water or an oil medium, for example peanut oil, liquid paraffin or olive oil.

[0348] Aqueous suspensions contain the active materials in a mixture with excipients suitable for the manufacture of aqueous suspensions. Such excipients are suspending agents, for example sodium carboxymethylcellulose, methylcellulose, hydropropyl-methylcellulose, sodium alginate, polyvinylpyrrolidone, gum tragacanth and gum acacia; dispersing or wetting agents can be a naturally-occurring phosphatide, for example, lecithin, or condensation products of an alkylene oxide with fatty acids, for example polyoxyethylene stearate, or condensation products of ethylene oxide with long chain aliphatic alcohols, for example heptadecaethyleneoxycetanol, or condensation products of ethylene oxide with partial esters derived from fatty acids and a hexitol such as polyoxyethylene sorbitol monooleate, or condensation products of ethylene oxide with partial esters derived from fatty acids and hexitol anhydrides, for example polyethylene sorbitan monooleate. The aqueous suspensions can also contain one or more preservatives, for example ethyl, or n-propyl p-hydroxybenzoate, one or more coloring agents, one or more flavoring agents, and one or more sweetening agents, such as sucrose or saccharin.

[0349] Oily suspensions can be formulated by suspending the active ingredients in a vegetable oil, for example arachis oil, olive oil, sesame oil or coconut oil, or in a mineral oil such as liquid paraffin. The oily suspensions can contain a thickening agent, for example beeswax, hard paraffin or cetyl alcohol. Sweetening agents and flavoring agents can be added to provide palatable oral preparations. These compositions can be preserved by the addition of an anti-oxidant such as ascorbic acid.

[0350] Dispersible powders and granules suitable for preparation of an aqueous suspension by the addition of water provide the active ingredient in admixture with a dispersing or wetting agent, suspending agent and one or more preservatives. Suitable dispersing or wetting agents or suspending agents are exemplified by those already mentioned above. Additional excipients, for example sweetening, flavoring and coloring agents, can also be present.

[0351] Pharmaceutical compositions of the invention can also be in the form of oil-in-water emulsions. The oily phase can be a vegetable oil or a mineral oil or mixtures of these. Suitable emulsifying agents can be naturally-occurring gums, for example gum acacia or gum tragacanth, naturally-occurring phosphatides, for example soy bean, lecithin, and esters or partial esters derived from fatty acids and hexitol, anhydrides, for example sorbitan monooleate, and condensation products of the said partial esters with ethylene oxide, for example polyoxyethylene sorbitan monooleate. The emulsions can also contain sweetening and flavoring agents.

[0352] Syrups and elixirs can be formulated with sweetening agents, for example glycerol, propylene glycol, sorbitol, glucose or sucrose. Such formulations can also contain a demulcent, a preservative and flavoring and coloring agents. The pharmaceutical compositions can be in the form of a sterile injectable aqueous or oleaginous suspension. This suspension can be formulated according to the known art using those suitable dispersing or wetting agents and suspending agents that have been mentioned above. The sterile injectable preparation can also be a sterile injectable solution or suspension in a non-toxic parentally acceptable diluent or solvent, for example as a solution in 1,3-butanediol. Among the acceptable vehicles and solvents that can be employed are water, Ringer's solution and isotonic sodium chloride solution. In addition, sterile, fixed oils are conventionally employed as a solvent or suspending medium. For this purpose, any bland fixed oil can be employed including synthetic mono-or diglycerides. In addition, fatty acids such as oleic acid find use in the preparation of injectables.

[0353] The nucleic acid molecules of the invention can also be administered in the form of suppositories, e.g., for rectal administration of the drug. These compositions can be prepared by mixing the drug with a suitable non-irritating excipient that is solid at ordinary temperatures but liquid at the rectal temperature and will therefore melt in the rectum to release the drug. Such materials include cocoa butter and polyethylene glycols.

[0354] Nucleic acid molecules of the invention can be administered parenterally in a sterile medium. The drug, depending on the vehicle and concentration used, can either be suspended or dissolved in the vehicle. Advantageously, adjuvants such as local anesthetics, preservatives and buffering agents can be dissolved in the vehicle.

[0355] Dosage levels of the order of from about 0.1 mg to about 140 mg per kilogram of body weight per day are useful in the treatment of the above-indicated conditions (about 0.5 mg to about 7 g per subject per day). The amount of active ingredient that can be combined with the carrier materials to produce a single dosage form varies depending upon the host treated and the particular mode of administration. Dosage unit forms generally contain between from about 1 mg to about 500 mg of an active ingredient.

[0356] It is understood that the specific dose level for any particular subject depends upon a variety of factors including the activity of the specific compound employed, the age, body weight, general health, sex, diet, time of administration, route of administration, and rate of excretion, drug combination and the severity of the particular disease undergoing therapy.

[0357] For administration to non-human animals, the composition can also be added to the animal feed or drinking water. It can be convenient to formulate the animal feed and drinking water compositions so that the animal takes in a therapeutically appropriate quantity of the composition along with its diet. It can also be convenient to present the composition as a premix for addition to the feed or drinking water.

[0358] The nucleic acid molecules of the present invention can also be administered to a subject in combination with other therapeutic compounds to increase the overall therapeutic effect. The use of multiple compounds to treat an indication can increase the beneficial effects while reducing the presence of side effects.

[0359] In one embodiment, the invention comprises compositions suitable for administering nucleic acid molecules of the invention to specific cell types. For example, the asialoglycoprotein receptor (ASGPr) (Wu and Wu, 1987, J. Biol. Chem. 262, 44294432) is unique to hepatocytes and binds branched galactose-terminal glycoproteins, such as asialoorosomucoid (ASOR). In another example, the folate receptor is overexpressed in many cancer cells. Binding of such glycoproteins, synthetic glycoconjugates, or folates to the receptor takes place with an affinity that strongly depends on the degree of branching of the oligosaccharide chain, for example, triatennary structures are bound with greater affinity than biatenarry or monoatennary chains (Baenziger and Fiete, 1980, Cell, 22, 611-620; Connolly et al., 1982, J. Biol. Chem., 257, 939-945). Lee and Lee, 1987, Glycoconjugate J., 4, 317-328, obtained this high specificity through the use of N-acetyl-D-galactosamine as the carbohydrate moiety, which has higher affinity for the receptor, compared to galactose. This “clustering effect” has also been described for the binding and uptake of mannosyl-terminating glycoproteins or glycoconjugates (Ponpipom et al., 1981, J. Med. Chem., 24, 1388-1395). The use of galactose, galactosamine, or folate based conjugates to transport exogenous compounds across cell membranes can provide a targeted delivery approach to, for example, the treatment of liver disease, cancers of the liver, or other cancers. The use of bioconjugates can also provide a reduction in the required dose of therapeutic compounds required for treatment. Furthermore, therapeutic bioavailability, pharmacodynamics, and pharmacokinetic parameters can be modulated through the use of nucleic acid bioconjugates of the invention. Non-limiting examples of such bioconjugates are described in Vargeese et al., U.S. Ser. No. 10/201,394, filed Aug. 13, 2001; and Matulic-Adamic et al., U.S. Ser. No. 60/362,016, filed Mar. 6, 2002.

[0360] Alternatively, certain siNA molecules of the instant invention can be expressed within cells from eukaryotic promoters (e.g., Izant and Weintraub, 1985, Science, 229, 345; McGarry and Lindquist, 1986, Proc. Natl. Acad. Sci., USA 83, 399; Scanlon et al., 1991, Proc. Natl. Acad. Sci. USA, 88, 10591-5; Kashani-Sabet et al., 1992, Antisense Res. Dev., 2, 3-15; Dropulic et al., 1992, J. Virol., 66, 143241; Weerasinghe et al., 1991, J. Virol., 65, 55314; Ojwang et al., 1992, Proc. Natl. Acad. Sci. USA, 89, 10802-6; Chen et al., 1992, Nucleic Acids Res., 20, 4581-9; Sarver et al., 1990 Science, 247, 1222-1225; Thompson et al., 1995, Nucleic Acids Res., 23, 2259; Good et al., 1997, Gene Therapy, 4, 45. Those skilled in the art realize that any nucleic acid can be expressed in eukaryotic cells from the appropriate DNA/RNA vector. The activity of such nucleic acids can be augmented by their release from the primary transcript by a enzymatic nucleic acid (Draper et al., PCT WO 93/23569, and Sullivan et al., PCT WO 94/02595; Ohkawa et al., 1992, Nucleic Acids Symp. Ser., 27, 15-6; Taira et al., 1991, Nucleic Acids Res., 19, 5125-30; Ventura et al., 1993, Nucleic Acids Res., 21, 3249-55; Chowrira et al., 1994, J. Biol. Chem., 269, 25856.

[0361] In another aspect of the invention, RNA molecules of the present invention can be expressed from transcription units (see for example Couture et al., 1996, TIG., 12, 510) inserted into DNA or RNA vectors. The recombinant vectors can be DNA plasmids or viral vectors. siNA expressing viral vectors can be constructed based on, but not limited to, adeno-associated virus, retrovirus, adenovirus, or alphavirus. In another embodiment, pol III based constructs are used to express nucleic acid molecules of the invention (see for example Thompson, U.S. Pats. Nos. 5,902,880 and 6,146,886). The recombinant vectors capable of expressing the siNA molecules can be delivered as described above, and persist in target cells. Alternatively, viral vectors can be used that provide for transient expression of nucleic acid molecules. Such vectors can be repeatedly administered as necessary. Once expressed, the siNA molecule interacts with the target mRNA and generates an RNAi response. Delivery of siNA molecule expressing vectors can be systemic, such as by intravenous or intramuscular administration, by administration to target cells ex-planted from a subject followed by reintroduction into the subject, or by any other means that would allow for introduction into the desired target cell (for a review see Couture et al., 1996, TIG., 12, 510).

[0362] In one aspect the invention features an expression vector comprising a nucleic acid sequence encoding at least one siNA molecule of the instant invention. The expression vector can encode one or both strands of a siNA duplex, or a single self-complementary strand that self hybridizes into a siNA duplex. The nucleic acid sequences encoding the siNA molecules of the instant invention can be operably linked in a manner that allows expression of the siNA molecule (see for example Paul et al., 2002, Nature Biotechnology, 19, 505; Miyagishi and Taira, 2002, Nature Biotechnology, 19, 497; Lee et al., 2002, Nature Biotechnology, 19, 500; and Novina et al., 2002, Nature Medicine, advance online publication doi: 10.1038/nm725).

[0363] In another aspect, the invention features an expression vector comprising: a) a transcription initiation region (e.g., eukaryotic pol I, II or III initiation region); b) a transcription termination region (e.g., eukaryotic pol I, II or III termination region); and c) a nucleic acid sequence encoding at least one of the siNA molecules of the instant invention, wherein said sequence is operably linked to said initiation region and said termination region in a manner that allows expression and/or delivery of the siNA molecule. The vector can optionally include an open reading frame (ORF) for a protein operably linked on the 5′ side or the 3′-side of the sequence encoding the siNA of the invention; and/or an intron (intervening sequences).

[0364] Transcription of the siNA molecule sequences can be driven from a promoter for eukaryotic RNA polymerase I (pol I), RNA polymerase II (pol II), or RNA polymerase III (pol III). Transcripts from pol II or pol III promoters are expressed at high levels in all cells; the levels of a given pol II promoter in a given cell type depends on the nature of the gene regulatory sequences (enhancers, silencers, etc.) present nearby. Prokaryotic RNA polymerase promoters are also used, providing that the prokaryotic RNA polymerase enzyme is expressed in the appropriate cells (Elroy-Stein and Moss, 1990, Proc. Natl. Acad. Sci. USA, 87, 6743-7; Gao and Huang 1993, Nucleic Acids Res., 21, 2867-72; Lieber et al., 1993, Methods Enzymol., 217, 47-66; Zhou et al., 1990, Mol. Cell. Biol., 10, 4529-37). Several investigators have demonstrated that nucleic acid molecules expressed from such promoters can function in mammalian cells (e.g. Kashani-Sabet et al., 1992, Antisense Res. Dev., 2, 3-15; Ojwang et al., 1992, Proc. Natl. Acad. Sci. USA, 89, 10802-6; Chen et al., 1992, Nucleic Acids Res., 20, 4581-9; Yu et al., 1993, Proc. Natl. Acad. Sci. USA, 90, 6340-4; L'Huillier et al., 1992, EMBO J, 11, 4411-8; Lisziewicz et al., 1993, Proc. Natl. Acad. Sci. U. S. A, 90, 8000-4; Thompson et al., 1995, Nucleic Acids Res., 23, 2259; Sullenger & Cech, 1993, Science, 262, 1566). More specifically, transcription units such as the ones derived from genes encoding U6 small nuclear (snRNA), transfer RNA (tRNA) and adenovirus VA RNA are useful in generating high concentrations of desired RNA molecules such as siNA in cells (Thompson et al., supra; Couture and Stinchcomb, 1996, supra; Noonberg et al., 1994, Nucleic Acid Res., 22, 2830; Noonberg et al., U.S. Pat. No. 5,624,803; Good et al., 1997, Gene Ther., 4, 45; Beigelman et al., International PCT Publication No. WO 96/18736. The above siNA transcription units can be incorporated into a variety of vectors for introduction into mammalian cells, including but not restricted to, plasmid DNA vectors, viral DNA vectors (such as adenovirus or adeno-associated virus vectors), or viral RNA vectors (such as retroviral or alphavirus vectors) (for a review see Couture and Stinchcomb, 1996, supra).

[0365] In another aspect the invention features an expression vector comprising a nucleic acid sequence encoding at least one of the siNA molecules of the invention in a manner that allows expression of that siNA molecule. The expression vector comprises in one embodiment; a) a transcription initiation region; b) a transcription termination region; and c) a nucleic acid sequence encoding at least one strand of the siNA molecule, wherein the sequence is operably linked to the initiation region and the termination region in a manner that allows expression and/or delivery of the siNA molecule.

[0366] In another embodiment the expression vector comprises: a) a transcription initiation region; b) a transcription termination region; c) an open reading frame; and d) a nucleic acid sequence encoding at least one strand of a siNA molecule, wherein the sequence is operably linked to the 3′-end of the open reading frame and wherein the sequence is operably linked to the initiation region, the open reading frame and the termination region in a manner that allows expression and/or delivery of the siNA molecule. In yet another embodiment, the expression vector comprises: a) a transcription initiation region; b) a transcription termination region; c) an intron; and d) a nucleic acid sequence encoding at least one siNA molecule, wherein the sequence is operably linked to the initiation region, the intron and the termination region in a manner which allows expression and/or delivery of the nucleic acid molecule.

[0367] In another embodiment, the expression vector comprises: a) a transcription initiation region; b) a transcription termination region; c) an intron; d) an open reading frame; and e) a nucleic acid sequence encoding at least one strand of a siNA molecule, wherein the sequence is operably linked to the 3′-end of the open reading frame and wherein the sequence is operably linked to the initiation region, the intron, the open reading frame and the termination region in a manner which allows expression and/or delivery of the siNA molecule.

BCR-ABL Biology and Biochemistry

[0368] Transformation is a cumulative process whereby normal control of cell growth and differentiation is interrupted, usually through the accumulation of mutations affecting the expression of genes that regulate cell growth and differentiation. More than 70% of hematopoietic malignancies have been shown to possess recurrent chromosomal translocations. The underlying mechanism of chromosomal translocation can be classified as either gene fusion or transcriptional deregulation. The gene fusion mechanism involves two genes that are joined into one, resulting in a chimeric RNA transcript which makes a chimeric protein product. Since the chimeric protein is not found in any normal tissue, it can serve as a tumor specific marker in identifying disease. A related change in protein function can confer a growth advantage leading to malignant transformation. Non-limiting examples of gene fusion products include BCR-ABL, PML-RAR-alpha, and MLL/LTG4, 9, 19. The transcriptional deregulation mechanism does not involve the generation of chimeric protein, but rather juxtaposes one gene to a target gene, thereby transcriptionally deregulating the target gene. This type of translocation is frequently found in lymphomas, such as the Myc translocation in Burkitt's lymphoma; the BCL2 translocation in follicular lymphoma; and BCL1 in mantle cell lymphoma.

[0369] Chronic myelogenous leukemia (also called chronic myeloid leukemia or CML) exhibits a characteristic disease course, presenting initially as a chronic granulocytic hyperplasia, and invariably evolving into an acute leukemia which is caused by the clonal expansion of a cell with a less differentiated phenotype, resulting in the blast crisis stage of the disease. CML is an unstable disease that ultimately progresses to a terminal stage which resembles acute leukemia. This lethal disease affects approximately 16,000 patients a year. Chemotherapeutic agents, such as hydroxyurea or busulfan, can reduce the leukemic burden but do not impact the life expectancy of the patient (which is approximately 4 years). Consequently, CML patients are candidates for bone marrow transplantation (BMT) therapy. However, for those patients who survive BMT, disease recurrence remains a major obstacle.

[0370] The Philadelphia (Ph) chromosome which results from the translocation of the abl oncogene from chromosome 9 to the BCR gene on chromosome 22 is found in greater than 95% of CML patients and in 10-25% of all cases of acute lymphoblastic leukemia. In virtually all Ph-positive CMLs and approximately 50% of the Ph-positive ALLs, the leukemic cells express BCR-ABL fusion mRNAs in which exon 2 (b2-a2 junction) or exon 3 (b3-a2 junction) from the major breakpoint cluster region of the BCR gene is spliced to exon 2 of the ABL gene. In the remaining cases of Ph-positive ALL, the first exon of the BCR gene is spliced to exon 2 of the ABL gene. The b3-a2 and b2-a2 fusion mRNAs encode 210 kd BCR-ABL fusion proteins which exhibit oncogenic activity through increased tyrosine kinase activity. The BCR-ABL tyrosine kinase elicits oncogenic transformation through the constitutive stimulation of specific signal transduction pathways. Several mechanisms have been proposed to explain how BCR-ABL transforms cells. For example, BCR-ABL has been shown to block apoptosis, increase cell proliferation, alter cell adhesion and increase cell motility.

[0371] With the exception of CML, chronic myeloproliferative disorders (CMPDs) are a heterogeneous spectrum of conditions for which the molecular pathogenesis is not well understood. Most cases have a normal or aneuploid karyotype, but a minority present with a reciprocal translocation that disrupts specific tyrosine kinase genes, most commonly PDGFRB or FGFR1. These translocations result in the production of constitutively active tyrosine kinase fusion proteins that deregulate hemopoiesis in a manner analogous to BCR-ABL. The chimeric product type of translocation in acute promyelocytic leukemia, which has t(15;17)(q22; q21), involves the promyelocytic leukemia (PML) gene. Although the function of PML still remains to be elucidated, the translocation to the Retinoid receptor A interupts its regulatory region, resulting in deregulation of gene function, most likely through the differentiation block at a stage where this function is required.

ERG Biology and Biochemistry

[0372] ERG is a member of the Ets oncogene superfamily of transcription factors which share common DNA binding domains yet differ in their transactivation domains. The Ets family of transcription factors are implicated in the control of the constitutive expression of a wide variety of genes. In hematopoietic cells, the Ets family appears to be important in the early stages of lymphocyte cell-type specification. ERG has been identified during arrayed cDNA library screens for genes encoding transcription factors expressed specifically during T cell lineage commitment. ERG expression is induced during T-cell lineage specification and is subsequently silenced permanently (Anderson et al., 1999, Development, 126(14), 3131-3148). ERG is rearranged in human myeloid leukemia with t(16;21) chromosomal translocation. This rearrangement generates the TLS-ERG oncogene which is associated with poor prognosis human acute myeloid leukemia (AML), secondary AML associated with myelodysplastic syndrom (MDS), and chronic myeloid leukemia (CML) in blast crisis (Kong et al., 1997, Blood, 90, 1192-1199). The altered transcriptional activating and DNA-binding activities of the TLS-ERG gene product are implicated in the genesis or progression of t(16;21))-associated human myeloid leukemias (Prasad et al., 1994, Oncogene, 9, 3717-3729). In addition, retroviral transduction of TLS-ERG has been shown to initiate a leukemogenic program in normal human hematopoietic cells (Pereira et al., 1998, PNAS USA, 95, 8239-8244).

[0373] The expression of several members of the Ets family of transcription factors, including ERG, correlates with the occurrence of invasive processes such as angiogenesis, including endothelial cell proliferation, endothelial cell differentiation, and matrix metalloproteinase transduction, during normal and pathological development (for review see Mattot et al., 1999, J. Soc. Biol., 193(2), 147-153 and Soncin et al., 1999, Pathol. Biol., 47(4), 358-363). Ets family transcription factors, including ERG, have been implicated in the upregulation of human heme oxygenase gene expression. Overexpression of human heme oxygenase-1 has been shown to have the potential to promote endothelial cell proliferation and angiogenesis. Ets binding sites in regulatory sequences of heme oxygenase-1 have been identified. As such, Ets family trascriptional regulation of human heme oxygenase may play an important role in coronary collateral circulation, tumor growth, angiogenesis, and hemoglobin induced endothelial cell injury (Deramaudt et al., 1999, J. Cell. Biochem., 72(3), 311-321).

[0374] The Ets, Fos, and Jun transciption factors control the expression of stromelysin-1 and collagenase-1 genes that encode two matrix metalloproteinases implicated in normal growth and development, as well as in tumor invasion and metastasis. It has been shown that the Ets transcription factors interact with each other and with the c-Fos/c-Jun complex via distinct protein domains in both a DNA-dependent and independent manner (Basuyaux et al., 1997, J. Biol. Chem., 272(42), 26188-95). Moreover, ERG activates collagenase-1 gene by physically interacting with c-Fos/c-Jun (Buttice et al., 1996, Oncogene, 13(11), 2297-2306). Altered expression of ERG is associated with genetic translocations on chromosome 21 in immortal and cervical carcinoma cell lines (Simpson et al., 1997, Oncogene, 14(18), 2149-2157). An additional translocation fusion product of ERG, EWS-ERG, has been identified in a large proportion of Ewing family tumors as a transcriptional activator (Sorensen et al., 1994, Nat. Genet., 6(2), 146-151). Expression of the EWS-ERG fusion protein has been shown to be essential for maintaining the oncogenic and tumorigenic properties of certain human tumor cells via inhibition of apoptosis (Yi et al., 1997, Oncogene, 14(11), 1259-1268). Hart et al., 1995, Oncogene, 10(7), 1423-30, describe human ERG as a proto-oncogene with mitogenic and transforming activity. Transfection of NIH3T3 cells with an ERG expression construct driven by the sheep metallothionein 1a promoter (sMTERG) results in cells that become morphologically altered, non-serum and non-anchorage dependant, and result in the formation of solid tumors when injected in nude mice (Hart et al., supra).

[0375] The endothelium, which lines the blood vessels and acts as a barrier between blood and tissues, plays an important role in maintaining vascular homeostasis. The endothelium regulates processes such as leukocyte infiltration, coagulation, and maintains the integrity of cell-cell junctions. Proliferation of endothelial cells, which occurs in angiogenesis, is a tightly controlled process that can occur in a physiological state (e.g. in wound healing and the menstrual cycle) but also occurs in a disease. Endothelial activation is involved in diseases such as cancer and metastasis, rheumatoid arthritis, cataract formation, atherosclerosis, thrombosis and many others. Inflammatory mediators such as the pleiotropic cytokine TNF-alpha alter the resting phenotype of the endothelium such that it becomes pro-inflammatory, pro-thrombotic and often pro-angiogenic. The ensuing changes in gene regulation have been extensively studied and involve the up-regulation of inflammatory cell adhesion molecules ICAM-1, E-selectin and VCAM-1 and pro-thrombotic proteins such as tissue factor, both in vitro and in vivo (McEver, 1991, Thrombosis and Haemostasis, 65, 223; Saadi et al., 1995, J. Exp. Med., 182, 1807). The role of TNF-alpha in modulating angiogenesis has been demonstrated in vivo but the evidence of an effect in vitro is less clear and in some cases conflicting. TNF-alpha is pro-angiogenic in rabbit corneal and chick chorioallantoic membrane in vivo models (Frater-Schroder et al., 1987, PNAS USA, 84, 5277; Leibovich et al., 1987, Nature, 329, 630) and more recently in rheumatoid arthritis patients, anti-TNF-alpha therapy decreased circulating levels of vascular endothelial growth factor (VEGF) (Paleolog, 1997, Molecular Pathology, 50, 225). In vitro, TNF-alpha can induce basic fibroblast growth factor (bFGF), platelet activated factor (PAF) and urokinase-type plasminogen activator (u-TPA), all of which are angiogenic and increase transcription of the VEGF receptor (VEGFR-2). On the contrary, TNF-alpha can also inhibit endothelial cell proliferation in vitro and cause tumor regression (Carswell et al., 1975, PNAS USA, 72, 3666). The mechanisms by which TNF-alpha mediates these effects on cell proliferation/angiogenesis are unclear and may involve regulation of genes which are not involved in the pro-inflammatory mode of action of this cytokine.

[0376] Studies on the effects of TNF-alpha on endothelial genes have shown that TNF-alpha down-regulates the transcription factor ERG in human umbilical vein endothelial cells (HUVEC) (McLaughlin et al., 1999, J. of Cell Science, 112, 4695). ERG is a member of the Ets family of transcription factors which play roles in embryonic development, inflammation, and cellular transformation. An 85 amino acid Ets domain is conserved throughout the family and is necessary for binding a GGAA core DNA binding site. ERG is a proto-oncogene as shown by the ability of NIH3T3 cells overexpressing ERG to form solid tumors in nude mice. Although downstream targets of ERG have not been clearly identified, in vitro evidence exists which suggests that an ERG cDNA can transactivate the vWF, ICAM-2, VE-Cadherin and collagenase promoters using reporter gene assays and purified ERG/GST protein or ERG from endothelial cell nuclear extracts can bind to the VE-Cadherin, stromelysin and vWF promoter Ets sites (McLaughlin et al., supra).

[0377] The use of small interfering nucleic acid molecules targeting chromosomal translocation genes such as BCR-ABL or ERG fusion genes therefore provides a useful class of novel therapeutic agents that can be used in the treatment of leukemias, lymphomas and/or any other disease or condition that can result from chomosomal translocation events.

### EXAMPLES

[0378] The following are non-limiting examples showing the selection, isolation, synthesis and activity of nucleic acids of the instant invention.

### Example 1

### Tandem Synthesis of siNA Constructs

[0379] Exemplary siNA molecules of the invention are synthesized in tandem using a cleavable linker, for example, a succinyl-based linker. Tandem synthesis as described herein is followed by a one-step purification process that provides RNAi molecules in high yield. This approach is highly amenable to siNA synthesis in support of high throughput RNAi screening, and can be readily adapted to multi-column or multi-well synthesis platforms.

[0380] After completing a tandem synthesis of a siNA oligo and its complement in which the 5′-terminal dimethoxytrityl (5′-O-DMT) group remains intact (trityl on synthesis), the oligonucleotides are deprotected as described above. Following deprotection, the siNA sequence strands are allowed to spontaneously hybridize. This hybridization yields a duplex in which one strand has retained the 5′-O-DMT group while the complementary strand comprises a terminal 5′-hydroxyl. The newly formed duplex behaves as a single molecule during routine solid-phase extraction purification (Trityl-On purification) even though only one molecule has a dimethoxytrityl group. Because the strands form a stable duplex, this dimethoxytrityl group (or an equivalent group, such as other trityl groups or other hydrophobic moieties) is all that is required to purify the pair of oligos, for example, by using a C18 cartridge.

[0381] Standard phosphoramidite synthesis chemistry is used up to the point of introducing a tandem linker, such as an inverted deoxy abasic succinate or glyceryl succinate linker (see FIG. 1) or an equivalent cleavable linker. A non-limiting example of linker coupling conditions that can be used includes a hindered base such as diisopropylethylamine (DIPA) and/or DMAP in the presence of an activator reagent such as Bromotripyrrolidinophosphoniumhexaflurorophosphate (PyBrOP). After the linker is coupled, standard synthesis chemistry is utilized to complete synthesis of the second sequence leaving the terminal the 5′-O-DMT intact. Following synthesis, the resulting oligonucleotide is deprotected according to the procedures described herein and quenched with a suitable buffer, for example with 50 mM NaOAc or 1.5M NH₄H₂CO₃.

[0382] Purification of the siNA duplex can be readily accomplished using solid phase extraction, for example, using a Waters C18 SepPak 1 g cartridge conditioned with 1 column volume (CV) of acetonitrile, 2 CV H2O, and 2 CV 50 mM NaOAc. The sample is loaded and then washed with 1 CV H2O or 50 mM NaOAc. Failure sequences are eluted with 1 CV 14% ACN (Aqueous with 50 mM NaOAc and 50 mM NaCl). The column is then washed, for example with 1 CV H2O followed by on-column detritylation, for example by passing 1 CV of 1% aqueous trifluoroacetic acid (TFA) over the column, then adding a second CV of 1% aqueous TFA to the column and allowing to stand for approximately 10 minutes. The remaining TFA solution is removed and the column washed with H2O followed by 1 CV 1M NaCl and additional H2O. The siNA duplex product is then eluted, for example, using 1 CV 20% aqueous CAN.

[0383] FIG. 2 provides an example of MALDI-TOF mass spectrometry analysis of a purified siNA construct in which each peak corresponds to the calculated mass of an individual siNA strand of the siNA duplex. The same purified siNA provides three peaks when analyzed by capillary gel electrophoresis (CGE), one peak presumably corresponding to the duplex siNA, and two peaks presumably corresponding to the separate siNA sequence strands. Ion exchange HPLC analysis of the same siNA contract only shows a single peak. Testing of the purified siNA construct using a luciferase reporter assay described below demonstrated the same RNAi activity compared to siNA constructs generated from separately synthesized oligonucleotide sequence strands.

### Example 2

### Identification of Potential siNA Target Sites in any RNA Sequence

[0384] The sequence of an RNA target of interest, such as a viral or human mRNA transcript, is screened for target sites, for example by using a computer folding algorithm. In a non-limiting example, the sequence of a gene or RNA gene transcript derived from a database, such as Genbank, is used to generate siNA targets having complementarity to the target. Such sequences can be obtained from a database, or can be determined experimentally as known in the art. Target sites that are known, for example, those target sites determined to be effective target sites based on studies with other nucleic acid molecules, for example ribozymes or antisense, or those targets known to be associated with a disease or condition such as those sites containing mutations or deletions, can be used to design siNA molecules targeting those sites. Various parameters can be used to determine which sites are the most suitable target sites within the target RNA sequence. These parameters include but are not limited to secondary or tertiary RNA structure, the nucleotide base composition of the target sequence, the degree of homology between various regions of the target sequence, or the relative position of the target sequence within the RNA transcript. Based on these determinations, any number of target sites within the RNA transcript can be chosen to screen siNA molecules for efficacy, for example by using in vitro RNA cleavage assays, cell culture, or animal models. In a non-limiting example, anywhere from 1 to 1000 target sites are chosen within the transcript based on the size of the siNA construct to be used. High throughput screening assays can be developed for screening siNA molecules using methods known in the art, such as with multi-well or multi-plate assays to determine efficient reduction in target gene expression.

### Example 3

### Selection of siNA Molecule Target Sites in a RNA

[0385] The following non-limiting steps can be used to carry out the selection of siNAs targeting a given gene sequence or transcript.
[0386] 1. The target sequence is parsed in silico into a list of all fragments or subsequences of a particular length, for example 23 nucleotide fragments, contained within the target sequence. This step is typically carried out using a custom Perl script, but commercial sequence analysis programs such as Oligo, MacVector, or the GCG Wisconsin Package can be employed as well.
[0387] 2. In some instances the siNAs correspond to more than one target sequence; such would be the case for example in targeting different transcripts of the same gene, targeting different transcripts of more than one gene, or for targeting both the human gene and an animal homolog. In this case, a subsequence list of a particular length is generated for each of the targets, and then the lists are compared to find matching sequences in each list. The subsequences are then ranked according to the number of target sequences that contain the given subsequence; the goal is to find subsequences that are present in most or all of the target sequences. Alternately, the ranking can identify subsequences that are unique to a target sequence, such as a mutant target sequence. Such an approach would enable the use of siNA to target specifically the mutant sequence and not effect the expression of the normal sequence.
[0388] 3. In some instances the siNA subsequences are absent in one or more sequences while present in the desired target sequence; such would be the case if the siNA targets a gene with a paralogous family member that is to remain untargeted. As in case 2 above, a subsequence list of a particular length is generated for each of the targets, and then the lists are compared to find sequences that are present in the target gene but are absent in the untargeted paralog.
[0389] 4. The ranked siNA subsequences can be further analyzed and ranked according to GC content. A preference can be given to sites containing 30-70% GC, with a further preference to sites containing 40-60% GC.
[0390] 5. The ranked siNA subsequences can be further analyzed and ranked according to self-folding and internal hairpins. Weaker internal folds are preferred; strong hairpin structures are to be avoided.
[0391] 6. The ranked siNA subsequences can be further analyzed and ranked according to whether they have runs of GGG or CCC in the sequence. GGG (or even more Gs) in either strand can make oligonucleotide synthesis problematic and can potentially interfere with RNAi activity, so it is avoided whenever better sequences are available. CCC is searched in the target strand because that will place GGG in the antisense strand.
[0392] 7. The ranked siNA subsequences can be further analyzed and ranked according to whether they have the dinucleotide UU (uridine dinucleotide) on the 3′-end of the sequence, and/or AA on the 5′-end of the sequence (to yield 3′ UU on the antisense sequence). These sequences allow one to design siNA molecules with terminal TT thymidine dinucleotides.
[0393] 8. Four or five target sites are chosen from the ranked list of subsequences as described above. For example, in subsequences having 23 nucleotides, the right 21 nucleotides of each chosen 23-mer subsequence are then designed and synthesized for the upper (sense) strand of the siNA duplex, while the reverse complement of the left 21 nucleotides of each chosen 23-mer subsequence are then designed and synthesized for the lower (antisense) strand of the siNA duplex (see Tables II and HI). If terminal TT residues are desired for the sequence (as described in paragraph 7), then the two 3′ terminal nucleotides of both the sense and antisense strands are replaced by TT prior to synthesizing the oligos.
[0394] 9. The siNA molecules are screened in an in vitro, cell culture or animal model system to identify the most active siNA molecule or the most preferred target site within the target RNA sequence.
[0395] 10. Other design considerations can be used when selecting target nucleic acid sequences, see, for example, Reynolds et al., 2004, Nature Biotechnology Advanced Online Publication, 1 Feb. 2004, doi: 10.1038/nbt936 and Ui-Tei et al., 2004, Nucleic Acids Research, 32, doi: 10.1093/nar/gkh247.

[0396] In an alternate approach, a pool of siNA constructs specific to a BCR-ABL and/or ERG target sequence is used to screen for target sites in cells expressing BCR-ABL and/or ERG RNA, such as cultured human cultured chronic myelogenous leukemic cells (e.g., K562, HUVEC or HeLa cells). The general strategy used in this approach is shown in FIG. 9. A non-limiting example of such is a pool comprising sequences having any of SEQ ID NOS 1-1779. Cells expressing BCR-ABL and/or ERG (e.g., human cultured chronic myelogenous leukemic cells such as K562, HUVEC or HeLa cells) are transfected with the pool of siNA constructs and cells that demonstrate a phenotype associated with BCR-ABL and/or ERG inhibition are sorted. The pool of siNA constructs can be expressed from transcription cassettes inserted into appropriate vectors (see for example FIG. 7 and FIG. 8). The siNA from cells demonstrating a positive phenotypic change (e.g., decreased proliferation, decreased BCR-ABL and/or ERG mRNA levels or decreased BCR-ABL and/or ERG protein expression), are sequenced to determine the most suitable target site(s) within the target BCR-ABL and/or ERG RNA sequence.

### Example 4

### BCR-ABL and/or ERG Targeted siNA Design

[0397] siNA target sites were chosen by analyzing sequences of the BCR-ABL and/or ERG RNA target and optionally prioritizing the target sites on the basis of folding (structure of any given sequence analyzed to determine siNA accessibility to the target), by using a library of siNA molecules as described in Example 3, or alternately by using an in vitro siNA system as described in Example 6 herein. siNA molecules were designed that could bind each target and are optionally individually analyzed by computer folding to assess whether the siNA molecule can interact with the target sequence. Varying the length of the siNA molecules can be chosen to optimize activity. Generally, a sufficient number of complementary nucleotide bases are chosen to bind to, or otherwise interact with, the target RNA, but the degree of complementarity can be modulated to accommodate siNA duplexes or varying length or base composition. By using such methodologies, siNA molecules can be designed to target sites within any known RNA sequence, for example those RNA sequences corresponding to the any gene transcript.

[0398] Chemically modified siNA constructs are designed to provide nuclease stability for systemic administration in vivo and/or improved pharmacokinetic, localization, and delivery properties while preserving the ability to mediate RNAi activity. Chemical modifications as described herein are introduced synthetically using synthetic methods described herein and those generally known in the art. The synthetic siNA constructs are then assayed for nuclease stability in serum and/or cellular/tissue extracts (e.g. liver extracts). The synthetic siNA constructs are also tested in parallel for RNAi activity using an appropriate assay, such as a luciferase reporter assay as described herein or another suitable assay that can quantity RNAi activity. Synthetic siNA constructs that possess both nuclease stability and RNAi activity can be further modified and re-evaluated in stability and activity assays. The chemical modifications of the stabilized active siNA constructs can then be applied to any siNA sequence targeting any chosen RNA and used, for example, in target screening assays to pick lead siNA compounds for therapeutic development (see for example FIG. 11).

### Example 5

### Chemical Synthesis and Purification of siNA

[0399] siNA molecules can be designed to interact with various sites in the RNA message, for example, target sequences within the RNA sequences described herein. The sequence of one strand of the siNA molecule(s) is complementary to the target site sequences described above. The siNA molecules can be chemically synthesized using methods described herein. Inactive siNA molecules that are used as control sequences can be synthesized by scrambling the sequence of the siNA molecules such that it is not complementary to the target sequence. Generally, siNA constructs can by synthesized using solid phase oligonucleotide synthesis methods as described herein (see for example Usman et al., U.S. Pat. Nos. 5,804,683; 5,831,071; 5,998,203; 6,117,657; 6,353,098; 6,362,323; 6,437,117; 6,469,158; Scaringe et al., U.S. Pat. Nos. 6,111,086; 6,008,400; 6,111,086 all incorporated by reference herein in their entirety).

[0400] In a non-limiting example, RNA oligonucleotides are synthesized in a stepwise fashion using the phosphoramidite chemistry as is known in the art. Standard phosphoramidite chemistry involves the use of nucleosides comprising any of 5′-O-dimethoxytrityl, 2′-O-tert-butyldimethylsilyl, 3′-O-2-Cyanoethyl N,N-diisopropylphos-phoroamidite groups, and exocyclic amine protecting groups (e.g. N6-benzoyl adenosine, N4 acetyl cytidine, and N2-isobutyryl guanosine). Alternately, 2′-O-Silyl Ethers can be used in conjunction with acid-labile 2′-O-orthoester protecting groups in the synthesis of RNA as described by Scaringe supra. Differing 2′ chemistries can require different protecting groups, for example 2′-deoxy-2′-amino nucleosides can utilize N-phthaloyl protection as described by Usman et al., U.S. Pat. No. 5,631,360, incorporated by reference herein in its entirety).

[0401] During solid phase synthesis, each nucleotide is added sequentially (3′- to 5′-direction) to the solid support-bound oligonucleotide. The first nucleoside at the 3′-end of the chain is covalently attached to a solid support (e.g., controlled pore glass or polystyrene) using various linkers. The nucleotide precursor, a ribonucleoside phosphoramidite, and activator are combined resulting in the coupling of the second nucleoside phosphoramidite onto the 5′-end of the first nucleoside. The support is then washed and any unreacted 5′-hydroxyl groups are capped with a capping reagent such as acetic anhydride to yield inactive 5′-acetyl moieties. The trivalent phosphorus linkage is then oxidized to a more stable phosphate linkage. At the end of the nucleotide addition cycle, the 5′-O-protecting group is cleaved under suitable conditions (e.g., acidic conditions for trityl-based groups and Fluoride for silyl-based groups). The cycle is repeated for each subsequent nucleotide.

[0402] Modification of synthesis conditions can be used to optimize coupling efficiency, for example by using differing coupling times, differing reagent/phosphoramidite concentrations, differing contact times, differing solid supports and solid support linker chemistries depending on the particular chemical composition of the siNA to be synthesized. Deprotection and purification of the siNA can be performed as is generally described in Usman et al., U.S. Pat. No. 5,831,071, U.S. Pat. No. 6,353,098, U.S. Pat. No. 6,437,117, and Bellon et al., U.S. Pat. No. 6,054,576, U.S. Pat. No. 6,162,909, U.S. Pat. No. 6,303,773, or Scaringe supra, incorporated by reference herein in their entireties. Additionally, deprotection conditions can be modified to provide the best possible yield and purity of siNA constructs. For example, applicant has observed that oligonucleotides comprising 2′-deoxy-2′-fluoro nucleotides can degrade under inappropriate deprotection conditions. Such oligonucleotides are deprotected using aqueous methylamine at about 35° C. for 30 minutes. If the 2′-deoxy-2′-fluoro containing oligonucleotide also comprises ribonucleotides, after deprotection with aqueous methylamine at about 35° C. for 30 minutes, TEA-HF is added and the reaction maintained at about 65° C. for an additional 15 minutes.

### Example 6

### RNAi In Vitro Assay to Assess siNA Activity

[0403] An in vitro assay that recapitulates RNAi in a cell-free system is used to evaluate siNA constructs targeting BCR-ABL and/or ERG RNA targets. The assay comprises the system described by Tuschl et al., 1999, Genes and Development, 13, 3191-3197 and Zamore et al., 2000, Cell, 101, 25-33 adapted for use with BCR-ABL and/or ERG target RNA. A Drosophila extract derived from syncytial blastoderm is used to reconstitute RNAi activity in vitro. Target RNA is generated via in vitro transcription from an appropriate BCR-ABL and/or ERG expressing plasmid using T7 RNA polymerase or via chemical synthesis as described herein. Sense and antisense siNA strands (for example 20 uM each) are annealed by incubation in buffer (such as 100 mM potassium acetate, 30 mM HEPES-KOH, pH 7.4, 2 mM magnesium acetate) for 1 minute at 90° C. followed by 1 hour at 37° C., then diluted in lysis buffer (for example 100 mM potassium acetate, 30 mM HEPES-KOH at pH 7.4, 2 mM magnesium acetate). Annealing can be monitored by gel electrophoresis on an agarose gel in TBE buffer and stained with ethidium bromide. The Drosophila lysate is prepared using zero to two-hour-old embryos from Oregon R flies collected on yeasted molasses agar that are dechorionated and lysed. The lysate is centrifuged and the supernatant isolated. The assay comprises a reaction mixture containing 50% lysate [vol/vol], RNA (10-50 pM final concentration), and 10% [vol/vol] lysis buffer containing siNA (10 nM final concentration). The reaction mixture also contains 10 mM creatine phosphate, 10 ug/ml creatine phosphokinase, 100 um GTP, 100 uM UTP, 100 uM CTP, 500 uM ATP, 5 mM DTT, 0.1 U/uL RNasin (Promega), and 100 uM of each amino acid. The final concentration of potassium acetate is adjusted to 100 mM. The reactions are pre-assembled on ice and preincubated at 25° C. for 10 minutes before adding RNA, then incubated at 25° C. for an additional 60 minutes. Reactions are quenched with 4 volumes of 1.25×Passive Lysis Buffer (Promega). Target RNA cleavage is assayed by RT-PCR analysis or other methods known in the art and are compared to control reactions in which siNA is omitted from the reaction.

[0404] Alternately, internally-labeled target RNA for the assay is prepared by in vitro transcription in the presence of [alpha-³²p] CTP, passed over a G50 Sephadex column by spin chromatography and used as target RNA without further purification. Optionally, target RNA is 5′-³²P-end labeled using T4 polynucleotide kinase enzyme. Assays are performed as described above and target RNA and the specific RNA cleavage products generated by RNAi are visualized on an autoradiograph of a gel. The percentage of cleavage is determined by PHOSPHOR IMAGER® (autoradiography) quantitation of bands representing intact control RNA or RNA from control reactions without siNA and the cleavage products generated by the assay.

[0405] In one embodiment, this assay is used to determine target sites in the BCR-ABL and/or ERG RNA target for siNA mediated RNAi cleavage, wherein a plurality of siNA constructs are screened for RNAi mediated cleavage of the BCR-ABL and/or ERG RNA target, for example, by analyzing the assay reaction by electrophoresis of labeled target RNA, or by northern blotting, as well as by other methodology well known in the art.

### Example 7

### Nucleic Acid Inhibition of BCR-ABL and/or ERG Target RNA

[0406] siNA molecules targeted to the human BCR-ABL and/or ERG RNA are designed and synthesized as described above. These nucleic acid molecules can be tested for cleavage activity in vivo, for example, using the following procedure. The target sequences and the nucleotide location within the BCR-ABL and/or ERG RNA are given in Tables II and III.

[0407] Two formats are used to test the efficacy of siNAs targeting BCR-ABL and/or ERG. First, the reagents are tested in cell culture using, for example, cultured chronic myelogenous leukemic cells (e.g., K562, HUVEC or HeLa cells), to determine the extent of RNA and protein inhibition. siNA reagents (e.g.; see Tables II and HI) are selected against the BCR-ABL and/or ERG target as described herein. RNA inhibition is measured after delivery of these reagents by a suitable transfection agent to, for example, cultured K562, HUVEC or HeLa cells. Relative amounts of target RNA are measured versus actin using real-time PCR monitoring of amplification (eg., ABI 7700 TAQMAN®). A comparison is made to a mixture of oligonucleotide sequences made to unrelated targets or to a randomized siNA control with the same overall length and chemistry, but randomly substituted at each position. Primary and secondary lead reagents are chosen for the target and optimization performed. After an optimal transfection agent concentration is chosen, a RNA time-course of inhibition is performed with the lead siNA molecule. In addition, a cell-plating format can be used to determine RNA inhibition.

Delivery of siNA to Cells

[0408] Cells (e.g., cultured K562, HUVEC or HeLa cells) are seeded, for example, at 1×10⁵ cells per well of a six-well dish in EGM-2 (BioWhittaker) the day before transfection. siNA (final concentration, for example 20 nM) and cationic lipid (e.g., final concentration 2 μg/ml) are complexed in EGM basal media (Bio Whittaker) at 37° C. for 30 minutes in polystyrene tubes. Following vortexing, the complexed siNA is added to each well and incubated for the times indicated. For initial optimization experiments, cells are seeded, for example, at 1×10³ in 96 well plates and siNA complex added as described. Efficiency of delivery of siNA to cells is determined using a fluorescent siNA complexed with lipid. Cells in 6-well dishes are incubated with siNA for 24 hours, rinsed with PBS and fixed in 2% paraformaldehyde for 15 minutes at room temperature. Uptake of siNA is visualized using a fluorescent microscope.

TAQMAN® (Real-Time PCR Monitoring of Amplification) and Lightcycler Quantification of mRNA

[0409] Total RNA is prepared from cells following siNA delivery, for example, using Qiagen RNA purification kits for 6-well or Rneasy extraction kits for 96-well assays. For TAQMAN® analysis (real-time PCR monitoring of amplification), dual-labeled probes are synthesized with the reporter dye, FAM or JOE, covalently linked at the 5′-end and the quencher dye TAMRA conjugated to the 3′-end. One-step RT-PCR amplifications are performed on, for example, an ABI PRISM 7700 Sequence Detector using 50 μl reactions consisting of 10 μl total RNA, 100 nM forward primer, 900 nM reverse primer, 100 nM probe, 1× TaqMan PCR reaction buffer (PE-Applied Biosystems), 5.5 mM MgCl₂, 300 μM each dATP, dCTP, dGTP, and dTTP, 10 U RNase Inhibitor (Promega), 1.25 U AMPLITAQ GOLD® (DNA polymerase) (PE-Applied Biosystems) and 10 U M-MLV Reverse Transcriptase (Promega). The thermal cycling conditions can consist of 30 minutes at 48° C., 10 minutes at 95° C., followed by 40 cycles of 15 seconds at 95° C. and 1 minute at 60° C. Quantitation of mRNA levels is determined relative to standards generated from serially diluted total cellular RNA (300, 100, 33, 11 ng/rxn) and normalizing to β-actin or GAPDH mRNA in parallel TAQMAN® reactions (real-time PCR monitoring of amplification). For each gene of interest an upper and lower primer and a fluorescently labeled probe are designed. Real time incorporation of SYBR Green I dye into a specific PCR product can be measured in glass capillary tubes using a lightcyler. A standard curve is generated for each primer pair using control cRNA. Values are represented as relative expression to GAPDH in each sample.

Western Blotting

[0410] Nuclear extracts can be prepared using a standard micro preparation technique (see for example Andrews and Faller, 1991, Nucleic Acids Research, 19, 2499). Protein extracts from supernatants are prepared, for example using TCA precipitation. An equal volume of 20% TCA is added to the cell supernatant, incubated on ice for 1 hour and pelleted by centrifugation for 5 minutes. Pellets are washed in acetone, dried and resuspended in water. Cellular protein extracts are run on a 10% Bis-Tris NuPage (nuclear extracts) or 4-12% Tris-Glycine (supernatant extracts) polyacrylamide gel and transferred onto nitro-cellulose membranes. Non-specific binding can be blocked by incubation, for example, with 5% non-fat milk for 1 hour followed by primary antibody for 16 hour at 4° C. Following washes, the secondary antibody is applied, for example (1:10,000 dilution) for 1 hour at room temperature and the signal detected with SuperSignal reagent (Pierce).

### Example 8

### Models Useful to Evaluate the Down-Regulation of BCR-ABL and/or ERG Gene Expression

BCR-ABL:

Cell Culture

[0411] There are numerous cell culture systems that can be used to analyze reduction of BCR-ABL levels either directly or indirectly by measuring downstream effects. For example, cultured human chronic myelogenous leukemic cells (e.g., K562, HUVEC or HeLa cells) can be used in cell culture experiments to assess the efficacy of nucleic acid molecules of the invention. As such, K562, HUVEC or HeLa cells treated with nucleic acid molecules of the invention (e.g., siNA) targeting BCR-ABL RNA would be expected to have decreased BCR-ABL expression capacity compared to matched control nucleic acid molecules having a scrambled or inactive sequence. In a non-limiting example, human chronic myelogenous leukemic cells (K562, HUVEC or HeLas) are cultured and BCR-ABL expression is quantified, for example by time-resolved immunofluorometric assay. BCR-ABL messenger-RNA expression is quantitated with RT-PCR in cultured K562, HUVEC or HeLas. Untreated cells are compared to cells treated with siNA molecules transfected with a suitable reagent, for example a cationic lipid such as lipofectamine, and BCR-ABL protein and RNA levels are quantitated. Dose response assays are then performed to establish dose dependent inhibition of BCR-ABL expression. In another non-limiting example, cell culture experiments are carried out as described by Wilda et al., 2002, Oncogene, 21, 5716.

[0412] In several cell culture systems, cationic lipids have been shown to enhance the bioavailability of oligonucleotides to cells in culture (Bennet, et al., 1992, Mol. Pharmacology, 41, 1023-1033). In one embodiment, siNA molecules of the invention are complexed with cationic lipids for cell culture experiments. siNA and cationic lipid mixtures are prepared in serum-free DMEM immediately prior to addition to the cells. DMEM plus additives are warmed to room temperature (about 20-25° C.) and cationic lipid is added to the final desired concentration and the solution is vortexed briefly. siNA molecules are added to the final desired concentration and the solution is again vortexed briefly and incubated for 10 minutes at room temperature. In dose response experiments, the RNA/lipid complex is serially diluted into DMEM following the 10 minute incubation.

Animal Models

[0413] Evaluating the efficacy of anti-BCR-ABL agents in animal models is an important prerequisite to human clinical trials. A BCR-ABL transgenic mouse model has been described (Huettner et al., 2000, Nature Genetics, 24, 57-60) Four BCR-ABL1 transresponder lines (2, 3, 4 and 27) were established from founder animals. Transgenic mice were born with the expected mendelian frequency and developed normally, indicating that the tetracycline-responsive expression system corrects for BCR-ABL1 toxicity in embryonic tissue. No mice transgenic for the transresponder construct developed any haematological disorder with a median follow-up period of 10 months. Double transgenic mice (BCR-ABL1-tetracycline transactivator (tTA)) were generated by breeding female transresponder mice with male mouse mammary tumour virus (MMTV)-tTA transactivator mice under continuous administration of tetracycline (0.5 g/l) in the drinking water, starting five days before mating. The genotypic distribution of double transgenic mice followed the predicted mendelian frequency in all four lines. Withdrawal of tetracycline administration in double transgenic animals allowed expression of BCR-ABL1 and resulted in the development of lethal leukemia in 100% of the mice within a time frame that was consistent within each line. Such transgenic mice are useful as models for cancer and for identifying nucleic acid molecules of the invention that modulate BCR-ABL gene expression and gene function toward the development of a therapeutic for use in treating cancer.

ERG:

Cell Culture

[0414] There are several cell-culture models that can be utilized to determine the efficacy of nucleic acid molecules of the instant invention directed against Erg expression. Hart et al., 1995, Oncogene, 10(7), 1423-30, describe the transfection of NIH3T3 cells with an Erg expression construct consisting of human Erg cDNA diven by the sheep metallothionein 1a promoter (sMTERG). Established clonal cell lines overexpressing Erg became morphologically altered, grew in low-serum and serum free media, and gave rise to colonies in soft agar suspension. These colonies resulted in the formation of solid tumors when injected into nude mice. Yi et al., 1997, Oncogene, 14(11), 1259-1268, describe the expression of Erg and aberrant Erg fusion proteins as inhibitory in the induction of apoptosis in NIH3T3 and Ewing's sarcoma cells induced by either serum deprivation or by treatment with calcium ionophore. Inhibition of the expression of the aberrant fusion proteins by antisense RNA techniques resulted in the increased susceptibility of these cells to apoptosis leading to cell death. As such, these cell lines can be used for the evaluation of nucleic acid molecules of the instant invention via Erg RNA knockdown, Erg protein knockdown, and proliferation-based endpoints.

Animal Models

[0415] There are several animal models in which the anti-proliferative and anti-angiogenic effect of nucleic acids of the present invention, such as siRNA, directed against Erg RNA can be tested. The mouse model described by Hart et al., supra, can be used to evaluate nucleic acid molecules of the instant invention in vivo for anti-tumorigenic capacity. Additional models can be used to study the anti-angiogenic capacity of the nucleic acid molecules of the instant invention. Typically a corneal model has been used to study angiogenesis in rat and rabbit since recruitment of vessels can easily be followed in this normally avascular tissue (Pandey et al., 1995 Science 268: 567-569). In these models, a small Teflon or Hydron disk pretreated with an angiogenic compound is inserted into a pocket surgically created in the cornea. Angiogenesis is monitored 3 to 5 days later. siRNA directed against ARNT, Tie-2 or integrin subunit RNAs would be delivered in the disk as well, or dropwise to the eye over the time course of the experiment. In another eye model, hypoxia has been shown to cause both increased expression of VEGF and neovascularization in the retina (Pierce et al., 1995 Proc. Natl. Acad. Sci. USA. 92: 905-909; Shweiki et al., 1992 J. Clin. Invest. 91: 2235-2243).

[0416] Another animal model that addresses neovascularization involves Matrigel, an extract of basement membrane that becomes a solid gel when injected subcutaneously (Passaniti et al., 1992 Lab. Invest. 67: 519-528). When the Matrigel is supplemented with angiogenesis factors, vessels grow into the Matrigel over a period of 3 to 5 days and angiogenesis can be assessed. Again, siRNA directed against ARNT, Tie-2 or integrin subunit RNAs would be delivered in the Matrigel.

[0417] Several animal models exist for screening of anti-angiogenic agents. These include corneal vessel formation following corneal injury (Burger et al., 1985 Cornea 4: 35-41; Lepri, et al., 1994 J. Ocular Pharmacol. 10: 273-280; Ormerod et al., 1990 Am. J. Pathol. 137: 1243-1252) or intracorneal growth factor implant (Grant et al., 1993 Diabetologia 36: 282-291; Pandey et al. 1995 supra; Zieche et al., 1992 Lab. Invest. 67: 711-715), vessel growth into Matrigel matrix containing growth factors (Passaniti et al., 1992 supra), female reproductive organ neovascularization following hormonal manipulation (Shweiki et al., 1993 Clin. Invest. 91: 2235-2243), several models involving inhibition of tumor growth in highly vascularized solid tumors (O'Reilly et al., 1994 Cell 79: 315-328; Senger et al., 1993 Cancer and Metas. Rev. 12: 303-324; Takahasi et al., 1994 Cancer Res. 54: 4233-4237; Kim et al., 1993 supra), and transient hypoxia-induced neovascularization in the mouse retina (Pierce et al., 1995 Proc. Natl. Acad. Sci. USA. 92: 905-909).

[0418] The cornea model, described in Pandey et al. supra, is the most common and well characterized anti-angiogenic agent efficacy screening model. This model involves an avascular tissue into which vessels are recruited by a stimulating agent (growth factor, thermal or alkalai burn, endotoxin). The corneal model would utilize the intrastromal corneal implantation of a Teflon pellet soaked in a angiogenic compound-Hydron solution to recruit blood vessels toward the pellet which can be quantitated using standard microscopic and image analysis techniques. To evaluate their anti-angiogenic efficacy, siRNA is applied topically to the eye or bound within Hydron on the Teflon pellet itself. This avascular cornea as well as the Matrigel (see below) provide for low background assays. While the corneal model has been performed extensively in the rabbit, studies in the rat have also been conducted.

[0419] The mouse model (Passaniti et al., supra) is a non-tissue model which utilizes Matrigel, an extract of basement membrane (Kleinman et al., 1986) or Millipore® filter disk, which can be impregnated with growth factors and anti-angiogenic agents in a liquid form prior to injection. Upon subcutaneous administration at body temperature, the Matrigel or Millipore® filter disk forms a solid implant. An angiogenic compound would be embedded in the Matrigel or Millipore® filter disk which would be used to recruit vessels within the matrix of the Matrigel or Millipore® filter disk that can be processed histologically for endothelial cell specific vWF (factor VIII antigen) immunohistochemistry, Trichrome-Masson stain, or hemoglobin content. Like the cornea, the Matrigel or Millipore® filter disk are avascular; however, it is not tissue. In the Matrigel or Millipore® filter disk model, siRNA is administered within the matrix of the Matrigel or Millipore® filter disk to test their anti-angiogenic efficacy. Thus, delivery issues in this model, as with delivery of siRNA by Hydron-coated Teflon pellets in the rat cornea model, can be less problematic due to the homogeneous presence of the siRNA within the respective matrix.

[0420] Other model systems to study tumor angiogenesis is reviewed by Folkman, 1985 Adv. Cancer. Res., 43, 175.

Use of Murine Models

[0421] For a typical systemic study involving 10 mice (20 g each) per dose group, 5 doses (1, 3, 10, 30 and 100 mg/kg daily over 14 days continuous administration), approximately 400 mg of siRNA, formulated in saline would be used. A similar study in young adult rats (200 g) would require over 4 g. Parallel pharmacokinetic studies can involve the use of similar quantifies of siRNA further justifying the use of murine models.

siRNA and Lewis Lung Carcinoma and B-16 Melanoma Murine Models

[0422] Identifying a common animal model for systemic efficacy testing of siRNA is an efficient way of screening siRNA for systemic efficacy. The Lewis lung carcinoma and B-16 murine melanoma models are well accepted models of primary and metastatic cancer and are used for initial screening of anti-cancer. These murine models are not dependent upon the use of immunodeficient mice, are relatively inexpensive, and minimize housing concerns. Both the Lewis lung and B-16 melanoma models involve subcutaneous implantation of approximately 10⁶ tumor cells from metastatically aggressive tumor cell lines (Lewis lung lines 3LL or D122, LLc-LN7; B-16-BL6 melanoma) in C57BL/6J mice. Alternatively, the Lewis lung model can be produced by the surgical implantation of tumor spheres (approximately 0.8 mm in diameter). Metastasis also can be modeled by injecting the tumor cells directly i.v. In the Lewis lung model, microscopic metastases can be observed approximately 14 days following implantation with quantifiable macroscopic metastatic tumors developing within 21-25 days. The B-16 melanoma exhibits a similar time course with tumor neovascularization beginning 4 days following implantation. Since both primary and metastatic tumors exist in these models after 21-25 days in the same animal, multiple measurements can be taken as indices of efficacy. Primary tumor volume and growth latency as well as the number of micro- and macroscopic metastatic lung foci or number of animals exhibiting metastases can be quantitated. The percent increase in lifespan can also be measured. Thus, these models would provide suitable primary efficacy assays for screening systemically administered siRNA formulations.

[0423] In the Lewis lung and B-16 melanoma models, systemic pharmacotherapy with a wide variety of agents usually begins 1-7 days following tumor implantation/inoculation with either continuous or multiple administration regimens. Concurrent pharmacokinetic studies can be performed to determine whether sufficient tissue levels of siRNA can be achieved for pharmacodynamic effect to be expected. Furthermore, primary tumors and secondary lung metastases can be removed and subjected to a variety of in vitro studies (i.e. target RNA reduction).

Delivery of siRNA and siRNA Formulations in the Lewis Lung Model

[0424] Several siRNA formulations, including cationic lipid complexes which can be useful for inflammatory diseases (e.g. DIMRIE/DOPE, etc.) and RES evading liposomes which can be used to enhance vascular exposure of the siRNA, are of interest in cancer models due to their presumed biodistribution to the lung. Thus, liposome formulations can be used for delivering siRNA to sites of pathology linked to an angiogenic response.

### Example 9

### RNAi Mediated Inhibition of BCR-ABL and/or ERG Expression

[0425] siNA constructs (Table III) are tested for efficacy in reducing BCR-ABL and/or ERG RNA expression in, for example, K562, HUVEC or HeLa cells. Cells are plated approximately 24 hours before transfection in 96-well plates at 5,000-7,500 cells/well, 100 μl/well, such that at the time of transfection cells are 70-90% confluent. For transfection, annealed siNAs are mixed with the transfection reagent (Lipofectamine 2000, Invitrogen) in a volume of 50 μl/well and incubated for 20 minutes at room temperature. The siNA transfection mixtures are added to cells to give a final siNA concentration of 25 nM in a volume of 150 μl. Each siNA transfection mixture is added to 3 wells for triplicate siNA treatments. Cells are incubated at 37° for 24 hours in the continued presence of the siNA transfection mixture. At 24 hours, RNA is prepared from each well of treated cells. The supernatants with the transfection mixtures are first removed and discarded, then the cells are lysed and RNA prepared from each well. Target gene expression following treatment is evaluated by RT-PCR for the target gene and for a control gene (36B4, an RNA polymerase subunit) for normalization. The triplicate data is averaged and the standard deviations determined for each treatment. Normalized data are graphed and the percent reduction of target mRNA by active siNAs in comparison to their respective inverted control siNAs is determined.

[0426] In a non-limiting example, chemically modified siNA constructs (Table III) were tested for efficacy as described above in reducing ERG2 RNA expression in DLD1 cells. Active siNAs were evaluated compared to untreated cells, scrambled siNA control constructs (Scram1 and Scram2), and cells transfected with lipid alone (transfection control). Results are summarized in FIG. 23. FIG. 23 shows results for chemically modified siNA constructs targeting various sites in ERG2 mRNA. As shown in FIG. 23, the active siNA constructs provide significant inhibition of ERG2 gene expression in cell culture experiments as determined by levels of ERG2 mRNA when compared to appropriate controls. Additional stabilization chemistries as described in Table IV are similarly assayed for activity. These siNA constructs are compared to appropriate matched chemistry inverted controls. In addition, the siNA constructs are also compared to untreated cells, cells transfected with lipid and scrambled siNA constructs, and cells transfected with lipid alone (transfection control).

[0427] In another non-limiting example, chemically modified siNA constructs (Table III) were tested for efficacy as described above in reducing ERG2 RNA expression in Hela cells. Active siNAs were evaluated compared to untreated cells, a matched chemistry inverted control (IC), and a transfection control. Results are summarized in FIG. 24. FIG. 24 shows results for Stab 9/22 (Table IV) siNA constructs targeting various sites in ERG2 mRNA. As shown in FIG. 24, the active siNA constructs provide significant inhibition of ERG2 gene expression in cell culture experiments as determined by levels of ERG2 mRNA when compared to appropriate controls.

### Example 10

### Indications

[0428] The present body of knowledge in BCR-ABL research indicates the need for methods to assay BCR-ABL activity and for compounds that can regulate BCR-ABL expression for research, diagnostic, and therapeutic use. As described herein, the nucleic acid molecules of the present invention can be used in assays to diagnose disease state related of BCR-ABL levels. In addition, the nucleic acid molecules can be used to treat disease state related to BCR-ABL levels.

[0429] Particular conditions and disease states that can be associated with BCR-ABL expression modulation include including cancer (e.g. leukemia, such as CML and AML) and any other indications that can respond to the level of BCR-ABL in a cell or tissue.

[0430] Particular conditions and disease states that can be associated with ERG expression modulation include but are not limited to a broad spectrum of oncology and neovascularization-related indications, including but not limited to cancers of the lung, colon, breast, prostate, and cervix, lymphoma, Ewing's sarcoma and related tumors, melanoma, angiogenic disease states such as tumor angiogenesis, diabetic retinopathy, macular degeneration, neovascular glaucoma, myopic degeneration, arthritis such as rheumatoid arthritis, psoriasis, verruca vulgaris, angiofibroma of tuberous sclerosis, port-wine stains, Sturge Weber syndrome, Kippel-Trenaunay-Weber syndrome, Osler-Weber-rendu syndrome, leukemias such as acute myeloid leukemia, osteoporosis, wound healing and any other diseases or conditions that are related to or will respond to the levels of ERG in a cell or tissue, alone or in combination with other therapies.

[0431] Immunomodulators and chemotherapeutics are non-limiting examples of pharmaceutical agents that can be combined with or used in conjunction with the nucleic acid molecules (e.g. siNA molecules) of the instant invention. The use of radiation treatments and chemotherapeutics, such as Gemcytabine and cyclophosphamide, are non-limiting examples of chemotherapeutic agents that can be combined with or used in conjunction with the nucleic acid molecules (e.g. siNA molecules) of the instant invention. Those skilled in the art will recognize that other anti-cancer compounds and therapies can similarly be readily combined with the nucleic acid molecules of the instant invention (e.g. siNA molecules) and are hence within the scope of the instant invention. Such compounds and therapies are well known in the art (see for example Cancer: Principles and Pranctice of Oncology, Volumes 1 and 2, eds Devita, V. T., Hellman, S., and Rosenberg, S. A., J.B. Lippincott Company, Philadelphia, USA; incorporated herein by reference) and include, without limitation, folates, antifolates, pyrimidine analogs, fluoropyrimidines, purine analogs, adenosine analogs, topoisomerase I inhibitors, anthrapyrazoles, retinoids, antibiotics, anthacyclins, platinum analogs, alkylating agents, nitrosoureas, plant derived compounds such as vinca alkaloids, epipodophyllotoxins, tyrosine kinase inhibitors, taxols, radiation therapy, surgery, nutritional supplements, gene therapy, radiotherapy, for example 3D-CRT, immunotoxin therapy, for example ricin, and monoclonal antibodies. Specific examples of chemotherapeutic compounds that can be combined with or used in conduction with the nucleic acid molecules of the invention include, but are not limited to, Paclitaxel; Docetaxel; Methotrexate; Doxorubin; Edatrexate; Vinorelbine; Tomaxifen; Leucovorin; 5-fluoro uridine (5-FU); Ionotecan; Cisplatin; Carboplatin; Amsacrine; Cytarabine; Bleomycin; Mitomycin C; Dactinomycin; Mithramycin; Hexamethylmelamine; Dacarbazine; L-asperginase; Nitrogen mustard; Melphalan, Chlorambucil; Busulfan; Ifosfamide; 4-hydroperoxycyclophosphamide; Thiotepa; Irinotecan (CAMPTOSAR®, CPT-11, Camptothecin-11, Campto) Tamoxifen; Herceptin; IMC C225; ABX-EGF; and combinations thereof. The above list of compounds are non-limiting examples of compounds and/or methods that can be combined with or used in conjunction with the nucleic acid molecules (e.g. siNA) of the instant invention. Those skilled in the art will recognize that other drug compounds and therapies can similarly be readily combined with the nucleic acid molecules of the instant invention (e.g., siNA molecules) are hence within the scope of the instant invention.

### Example 11

### Diagnostic Uses

[0432] The siNA molecules of the invention can be used in a variety of diagnostic applications, such as in the identification of molecular targets (e.g., RNA) in a variety of applications, for example, in clinical, industrial, environmental, agricultural and/or research settings. Such diagnostic use of siNA molecules involves utilizing reconstituted RNAi systems, for example, using cellular lysates or partially purified cellular lysates. siNA molecules of this invention can be used as diagnostic tools to examine genetic drift and mutations within diseased cells or to detect the presence of endogenous or exogenous, for example viral, RNA in a cell. The close relationship between siNA activity and the structure of the target RNA allows the detection of mutations in any region of the molecule, which alters the base-pairing and three-dimensional structure of the target RNA. By using multiple siNA molecules described in this invention, one can map nucleotide changes, which are important to RNA structure and function in vitro, as well as in cells and tissues. Cleavage of target RNAs with siNA molecules can be used to inhibit gene expression and define the role of specified gene products in the progression of disease or infection. In this manner, other genetic targets can be defined as important mediators of the disease. These experiments will lead to better treatment of the disease progression by affording the possibility of combination therapies (e.g., multiple siNA molecules targeted to different genes, siNA molecules coupled with known small molecule inhibitors, or intermittent treatment with combinations siNA molecules and/or other chemical or biological molecules). Other in vitro uses of siNA molecules of this invention are well known in the art, and include detection of the presence of mRNAs associated with a disease, infection, or related condition. Such RNA is detected by determining the presence of a cleavage product after treatment with a siNA using standard methodologies, for example, fluorescence resonance emission transfer (FRET).

[0433] In a specific example, siNA molecules that cleave only wild-type or mutant forms of the target RNA are used for the assay. The first siNA molecules (i.e., those that cleave only wild-type forms of target RNA) are used to identify wild-type RNA present in the sample and the second siNA molecules (i.e., those that cleave only mutant forms of target RNA) are used to identify mutant RNA in the sample. As reaction controls, synthetic substrates of both wild-type and mutant RNA are cleaved by both siNA molecules to demonstrate the relative siNA efficiencies in the reactions and the absence of cleavage of the “non-targeted” RNA species. The cleavage products from the synthetic substrates also serve to generate size markers for the analysis of wild-type and mutant RNAs in the sample population. Thus, each analysis requires two siNA molecules, two substrates and one unknown sample, which is combined into six reactions. The presence of cleavage products is determined using an RNase protection assay so that full-length and cleavage fragments of each RNA can be analyzed in one lane of a polyacrylamide gel. It is not absolutely required to quantify the results to gain insight into the expression of mutant RNAs and putative risk of the desired phenotypic changes in target cells. The expression of mRNA whose protein product is implicated in the development of the phenotype (i.e., disease related or infection related) is adequate to establish risk. If probes of comparable specific activity are used for both transcripts, then a qualitative comparison of RNA levels is adequate and decreases the cost of the initial diagnosis. Higher mutant form to wild-type ratios are correlated with higher risk whether RNA levels are compared qualitatively or quantitatively.

[0434] All patents and publications mentioned in the specification are indicative of the levels of skill of those skilled in the art to which the invention pertains. All references cited in this disclosure are incorporated by reference to the same extent as if each reference had been incorporated by reference in its entirety individually.

[0435] One skilled in the art would readily appreciate that the present invention is well adapted to carry out the objects and obtain the ends and advantages mentioned, as well as those inherent therein. The methods and compositions described herein as presently representative of preferred embodiments are exemplary and are not intended as limitations on the scope of the invention. Changes therein and other uses will occur to those skilled in the art, which are encompassed within the spirit of the invention, are defined by the scope of the claims.

[0436] It will be readily apparent to one skilled in the art that varying substitutions and modifications can be made to the invention disclosed herein without departing from the scope and spirit of the invention. Thus, such additional embodiments are within the scope of the present invention and the following claims. The present invention teaches one skilled in the art to test various combinations and/or substitutions of chemical modifications described herein toward generating nucleic acid constructs with improved activity for mediating RNAi activity. Such improved activity can comprise improved stability, improved bioavailability, and/or improved activation of cellular responses mediating RNAi. Therefore, the specific embodiments described herein are not limiting and one skilled in the art can readily appreciate that specific combinations of the modifications described herein can be tested without undue experimentation toward identifying siNA molecules with improved RNAi activity.

[0437] The invention illustratively described herein suitably can be practiced in the absence of any element or elements, limitation or limitations that are not specifically disclosed herein. Thus, for example, in each instance herein any of the terms “comprising”, “consisting essentially of”, and “consisting of” may be replaced with either of the other two terms. The terms and expressions which have been employed are used as terms of description and not of limitation, and there is no intention that in the use of such terms and expressions of excluding any equivalents of the features shown and described or portions thereof, but it is recognized that various modifications are possible within the scope of the invention claimed. Thus, it should be understood that although the present invention has been specifically disclosed by preferred embodiments, optional features, modification and variation of the concepts herein disclosed may be resorted to by those skilled in the art, and that such modifications and variations are considered to be within the scope of this invention as defined by the description and the appended claims.

[0438] In addition, where features or aspects of the invention are described in terms of Markush groups or other grouping of alternatives, those skilled in the art will recognize that the invention is also thereby described in terms of any individual member or subgroup of members of the Markush group or other group.

TABLE I
BCR-ABL and ERG Accession Numbers

NM_004327
Homo sapiens breakpoint cluster region (BCR), transcript variant 1, mRNA
gi|11038638|ref|NM_004327.2|[11038638]
NM_021574
Homo sapiens breakpoint cluster region (BCR), transcript variant 2, mRNA
gi|11038640|ref|NM_021574.1|[11038640]
NM_005157
Homo sapiens v-abl Abelson murine leukemia viral oncogene homolog 1 (ABL1),
transcript variant a, mRNA
gi|6382056|ref|NM_005157.2|[6382056]
NM_007313
Homo sapiens v-abl Abelson murine leukemia viral oncogene homolog 1 (ABL1),
transcript variant b, mRNA
gi|6382057|ref|NM_007313.1|[6382057]
AJ131467
Homo sapiens mRNA for BCR/ABL chimeric fusion peptide, partial
gi|4033556|emb|AJ131467.1|HSA131467[4033556]
AJ131466
Homo sapiens mRNA for BCR/ABL (major breakpoint) fusion peptide, partial
gi|4033554|emb|AJ131466.1|HSA131466[4033554]
AF044317
Homo sapiens TEL/AML1 fusion gene, partial sequence
gi|2920622|gb|AF044317.1|AF044317[2920622]
AF327066
Homo sapiens Ewings sarcoma EWS-Fli1 (type 1) oncogene mRNA, complete cds
gi|12963354|gb|AF327066.1|AF327066[12963354]
S71805
TLS/FUS...ERG {translocation} [human, myeloid leukemia patient, peripheral
blood, bone marrow cells, mRNA Partial Mutant, 3 genes, 99 nt]
gi|560579|bbm|344598|bbs|151117|gb|S71805.1|S71805[560579]
AF178854
Synthetic construct Pax3-forkhead fusion protein (Pax3/FKHR) mRNA, complete cds
gi|6636096|gb|AF178854.1|AF178854[6636096]
S78159
Homo sapiens AML1-ETO fusion protein (AML1-ETO) mRNA, partial cds
gi|999360|bbm|371144|bbs|166913|gb|S78159.1|S78159[999360]
NM_004449
Homo sapiens v-ets erythroblastosis virus E26 oncogene like (avian) (ERG), mRNA
gi|7657065|ref|NM_004449.2|[7657065]
M21535
Human erg protein (ets-related gene) mRNA, complete cds
gi|182182|gb|M21535.1|HUMERG11[182182]
M21536
Human erg protein (ets-related gene) mRNA, 3′ flank
gi|182183|gb|M21536.1|HUMERG12[182183]
M21535
Human erg protein (ets-related gene) mRNA, complete cds
gi|182182|gb|M21535.1|HUMERG11[182182]
M98833
Homo sapiens ERGB transcription factor mRNA, complete cds
gi|7025922|gb|M98833.3|HUMERGBFLI[7025922]
X67001
H. sapiens HUMFLI-1 mRNA
gi|32529|emb|X67001.1|HSHUMFLI[32529]
M93255
Human FLI-1 mRNA, complete cds for two alternate splicings
gi|182659|gb|M93255.1|HUMFLI1A[182659]
NM_002017
Homo sapiens Friend leukemia virus integration 1 (FLI1), mRNA
gi|7110592|ref|NM_002017.2|[7110592]
S45205
Fli-1 = Friend leukemia integration 1 [human, mRNA, 1673 nt]
gi|257353|bbm|246089|bbs|115336|gb|S45205.1|S45205[257353]
S45205
GI number 628772 references a Protein record; you are currently using the
Nucleotide database.
S82338
Homo sapiens fusion gene (ERG/EWS) gene, partial cds
gi|1703711|bbm|387740|bbs|178240|gb|S82338.1|S82338[1703711]
S82335
EWS/ERG = fusion gene {EWS exon 7 —ERG exon 8, translocation} [human, left iliac
bone, liver, osteolytic tumor patient, MON isolate, Genomic, 74 nt]
gi|1703709|bbm|387732|bbs|178239|gb|S82335.1|S82335[1703709]
S73762
EWS...erg {reciprocal translocation junction site} [human, Ewing's sarcoma cell
line #5838 cells, Genomic Mutant, 3 genes, 267 nt]
gi|688241|bbm|352440|bbs|156728|gb|S73762.1|S73762[688241]
S73762
GI number 2146518 references a Protein record; you are currently using the
Nucleotide database.
S72865
EWS...EWS-erg = EWS-erg fusion protein type 9e [human, SK-PN-LI cell line, mRNA
Partial Mutant, 3 genes, 588 nt]
gi|633777|bbm|347812|bbs|154042|gb|S72865.1|S72865[633777]
S72865
GI number 2145741 references a Protein record; you are currently using the
Nucleotide database.
S72622
EWS-erg = EWS-erg fusion protein type 3e {translocation, type 3e} [human, T92-60
tumor, mRNA Partial Mutant, 54 nt]
gi|633775|bbm|347423|bbs|153611|gb|S72622.1|S72622[633775]
S72621
EWS...erg {translocation, type 1e and 9e} [human, SK-PN-LI cell line, mRNA
Partial Mutant, 3 genes, 762 nt]
gi|633773|bbm|347409|bbs|153609|gb|S72621.1|S72621[633773]
S70593
Homo sapiens EWS/ERG fusion protein (EWS/ERG) mRNA, partial cds
gi|546447|bbm|340883|bbs|148946|gb|S70593.1|S70593[546447]
S70579
Homo sapiens EWS/ERG fusion protein (EWS/ERG) mRNA, partial cds
gi|546445|bbm|340872|bbs|148944|gb|S70579.1|S70579[546445]
AB028209
Mus musculus mRNA, up-regulated by FUS-ERG, 3′ region, cDNA fragment: C14G220
gi|6139005|dbj|AB028209.1|[6139005]
Y10001
H. sapiens DNA fragment containing fusion point of FUS gene and ERG gene,
translocation t(16; 21) (p11; q22)
gi|2181922|emb|Y10001.1|HSY10001[2181922]
S77574
TLS...ERG {translocation} [human, acute non-lymphocytic leukemia cell lines
IRTA17 and IRTA21, mRNA Partial, 3 genes, 211 nt]
gi|957350|bbm|369615|bbs|165809|gb|S77574.1|S77574[957350]

[0439] TABLE II
BCR-ABL and ERG siNA and Target Sequences

| | | | | | | | | |
|---|---|---|---|---|---|---|---|---|
| | | Seq | | | Seq | | | Seq |
| Pos | Target Sequence | ID | UPos | Upper seq | ID | LPos | Lower seq | ID |

NM_004327 (BCR)

| | | | | | | | | |
|---|---|---|---|---|---|---|---|---|
| 3 | GGAGAUAGGUAGGAGUAGC | 1 | 3 | GGAGAUAGGUAGGAGUAGC | 1 | 21 | GCUACUCCUACCUAUCUCC | 264 |
| 21 | CGUGGUAAGGGCGAUGAGU | 2 | 21 | CGUGGUAAGGGCGAUGAGU | 2 | 39 | ACUCAUCGCCCUUACCACG | 265 |
| 39 | UGUGGGCCGGGCGGGAGUG | 3 | 39 | UGUGGGCCGGGCGGGAGUG | 3 | 57 | CACUCCCGCCCGGCCCACA | 266 |
| 57 | GCGGCGAGAGCCGGCUGGC | 4 | 57 | GCGGCGAGAGCCGGCUGGC | 4 | 75 | GCCAGCCGGCUCUCGCCGC | 267 |
| 75 | CUGAGCUUAGCGUCCGAGG | 5 | 75 | CUGAGCUUAGCGUCCGAGG | 5 | 93 | CCUCGGACGCUAAGCUCAG | 268 |
| 93 | GAGGCGGCGGCGGCGGCGG | 6 | 93 | GAGGCGGCGGCGGCGGCGG | 6 | 111 | CCGCCGCCGCCGCCGCCUC | 269 |
| 111 | GCGGCAGCGGCGGCGGCGG | 7 | 111 | GCGGCAGCGGCGGCGGCGG | 7 | 129 | CCGCCGCCGCCGCUGCCGC | 270 |
| 129 | GGGCUGUGGGGCGGUGCGG | 8 | 129 | GGGCUGUGGGGCGGUGCGG | 8 | 147 | CCGCACCGCCCCACAGCCC | 271 |
| 147 | GAAGCGAGAGGCGAGGAGC | 9 | 147 | GAAGCGAGAGGCGAGGAGC | 9 | 165 | GCUCCUCGCCUCUCGCUUC | 272 |
| 165 | CGCGCGGGCCGUGGCCAGA | 10 | 165 | CGCGCGGGCCGUGGCCAGA | 10 | 183 | UCUGGCCACGGCCCGCGCG | 273 |
| 183 | AGUCUGGCGGCGGCCUGGC | 11 | 183 | AGUCUGGCGGCGGCCUGGC | 11 | 201 | GCCAGGCCGCCGCCAGACU | 274 |
| 201 | CGGAGCGGAGAGCAGCGCC | 12 | 201 | CGGAGCGGAGAGCAGCGCC | 12 | 219 | GGCGCUGCUCUCCGCUCCG | 275 |
| 219 | CCGCGCCUCGCCGUGCGGA | 13 | 219 | CCGCGCCUCGCCGUGCGGA | 13 | 237 | UCCGCACGGCGAGGCGCGG | 276 |
| 237 | AGGAGCCCCGCACACAAUA | 14 | 237 | AGGAGCCCCGCACACAAUA | 14 | 255 | UAUUGUGUGCGGGGCUCCU | 277 |
| 255 | AGCGGCGCGCGCAGCCCGC | 15 | 255 | AGCGGCGCGCGCAGCCCGC | 15 | 273 | GCGGGCUGCGCGCGCCGCU | 278 |
| 273 | CGCCCUUCCCCCCGGCGCG | 16 | 273 | CGCCCUUCCCCCCGGCGCG | 16 | 291 | CGCGCCGGGGGGAAGGGCG | 279 |
| 291 | GCCCCGCCCCGCGCGCCGA | 17 | 291 | GCCCCGCCCCGCGCGCCGA | 17 | 309 | UCGGCGCGCGGGGCGGGGC | 280 |
| 309 | AGCGCCCCGCUCCGCCUCA | 18 | 309 | AGCGCCCCGCUCCGCCUCA | 18 | 327 | UGAGGCGGAGCGGGGCGCU | 281 |
| 327 | ACCUGCCACCAGGGAGUGG | 19 | 327 | ACCUGCCACCAGGGAGUGG | 19 | 345 | CCACUCCCUGGUGGCAGGU | 282 |
| 345 | GGCGGGCAUUGUUCGCCGC | 20 | 345 | GGCGGGCAUUGUUCGCCGC | 20 | 363 | GCGGCGAACAAUGCCCGCC | 283 |
| 363 | CCGCCGCCGCCGCGCGGGG | 21 | 363 | CCGCCGCCGCCGCGCGGGG | 21 | 381 | CCCCGCGCGGCGGCGGCGG | 284 |
| 381 | GCCAUGGGGGCCGCCCGGC | 22 | 381 | GCCAUGGGGGCCGCCCGGC | 22 | 399 | GCCGGGCGGCCCCCAUGGC | 285 |
| 399 | CGCCCGGGGCCGGGCCUGG | 23 | 399 | CGCCCGGGGCCGGGCCUGG | 23 | 417 | CCAGGCCCGGCCCCGGGCG | 286 |
| 417 | GCGAGGCCGCCGCGCCGCC | 24 | 417 | GCGAGGCCGCCGCGCCGCC | 24 | 435 | GGCGGCGCGGCGGCCUCGC | 287 |
| 435 | CGCUGAGACGGGCCCCGCG | 25 | 435 | CGCUGAGACGGGCCCCGCG | 25 | 453 | CGCGGGGCCCGUCUCAGCG | 288 |
| 453 | GCGCAGCCCGGCGGCGCAG | 26 | 453 | GCGCAGCCCGGCGGCGCAG | 26 | 471 | CUGCGCCGCCGGGCUGCGC | 289 |
| 471 | GGUAAGGCCGGCCGCGCCA | 27 | 471 | GGUAAGGCCGGCCGCGCCA | 27 | 489 | UGGCGCGGCCGGCCUUACC | 290 |
| 489 | AUGGUGGACCCGGUGGGCU | 28 | 489 | AUGGUGGACCCGGUGGGCU | 28 | 507 | AGCCCACCGGGUCCACCAU | 291 |
| 507 | UUCGCGGAGGCGUGGAAGG | 29 | 507 | UUCGCGGAGGCGUGGAAGG | 29 | 525 | CCUUCCACGCCUCCGCGAA | 292 |
| 525 | GCGCAGUUCCCGGACUCAG | 30 | 525 | GCGCAGUUCCCGGACUCAG | 30 | 543 | CUGAGUCCGGGAACUGCGC | 293 |
| 543 | GAGCCCCCGCGCAUGGAGC | 31 | 543 | GAGCCCCCGCGCAUGGAGC | 31 | 561 | GCUCCAUGCGCGGGGGCUC | 294 |
| 561 | CUGCGCUCAGUGGGCGACA | 32 | 561 | CUGCGCUCAGUGGGCGACA | 32 | 579 | UGUCGCCCACUGAGCGCAG | 295 |
| 579 | AUCGAGCAGGAGCUGGAGC | 33 | 579 | AUCGAGCAGGAGCUGGAGC | 33 | 597 | GCUCCAGCUCCUGCUCGAU | 296 |
| 597 | CGCUGCAAGGCCUCCAUUC | 34 | 597 | CGCUGCAAGGCCUCCAUUC | 34 | 615 | GAAUGGAGGCCUUGCAGCG | 297 |
| 615 | CGGCGCCUGGAGCAGGAGG | 35 | 615 | CGGCGCCUGGAGCAGGAGG | 35 | 633 | CCUCCUGCUCCAGGCGCCG | 298 |
| 633 | GUGAACCAGGAGCGCUUCC | 36 | 633 | GUGAACCAGGAGCGCUUCC | 36 | 651 | GGAAGCGCUCCUGGUUCAC | 299 |
| 651 | CGCAUGAUCUACCUGCAGA | 37 | 651 | CGCAUGAUCUACCUGCAGA | 37 | 669 | UCUGCAGGUAGAUCAUGCG | 300 |
| 669 | ACGUUGCUGGCCAAGGAAA | 38 | 669 | ACGUUGCUGGCCAAGGAAA | 38 | 687 | UUUCCUUGGCCAGCAACGU | 301 |
| 687 | AAGAAGAGCUAUGACCGGC | 39 | 687 | AAGAAGAGCUAUGACCGGC | 39 | 705 | GCCGGUCAUAGCUCUUCUU | 302 |
| 705 | CAGCGAUGGGGCUUCCGGC | 40 | 705 | CAGCGAUGGGGCUUCCGGC | 40 | 723 | GCCGGAAGCCCCAUCGCUG | 303 |
| 723 | CGCGCGGCGCAGGCCCCCG | 41 | 723 | CGCGCGGCGCAGGCCCCCG | 41 | 741 | CGGGGGCCUGCGCCGCGCG | 304 |
| 741 | GACGGCGCCUCCGAGCCCC | 42 | 741 | GACGGCGCCUCCGAGCCCC | 42 | 759 | GGGGCUCGGAGGCGCCGUC | 305 |
| 759 | CGAGCGUCCGCGUCGCGCC | 43 | 759 | CGAGCGUCCGCGUCGCGCC | 43 | 777 | GGCGCGACGCGGACGCUCG | 306 |
| 777 | CCGCAGCCAGCGCCCGCCG | 44 | 777 | CCGCAGCCAGCGCCCGCCG | 44 | 795 | CGGCGGGCGCUGGCUGCGG | 307 |
| 795 | GACGGAGCCGACCCGCCGC | 45 | 795 | GACGGAGCCGACCCGCCGC | 45 | 813 | GCGGCGGGUCGGCUCCGUC | 308 |
| 813 | CCCGCCGAGGAGCCCGAGG | 46 | 813 | CCCGCCGAGGAGCCCGAGG | 46 | 831 | CCUCGGGCUCCUCGGCGGG | 309 |
| 831 | GCCCGGCCCGACGGCGAGG | 47 | 831 | GCCCGGCCCGACGGCGAGG | 47 | 849 | CCUCGCCGUCGGGCCGGGC | 310 |
| 849 | GGUUCUCCGGGUAAGGCCA | 48 | 849 | GGUUCUCCGGGUAAGGCCA | 48 | 867 | UGGCCUUACCCGGAGAACC | 311 |
| 867 | AGGCCCGGGACCGCCCGCA | 49 | 867 | AGGCCCGGGACCGCCCGCA | 49 | 885 | UGCGGGCGGUCCCGGGCCU | 312 |
| 885 | AGGCCCGGGGCAGCCGCGU | 50 | 885 | AGGCCCGGGGCAGCCGCGU | 50 | 903 | ACGCGGCUGCCCCGGGCCU | 313 |
| 903 | UCGGGGGAACGGGACGACC | 51 | 903 | UCGGGGGAACGGGACGACC | 51 | 921 | GGUCGUCCCGUUCCCCCGA | 314 |
| 921 | CGGGGACCCCCCGCCAGCG | 52 | 921 | CGGGGACCCCCCGCCAGCG | 52 | 939 | CGCUGGCGGGGGGUCCCCG | 315 |
| 939 | GUGGCGGCGCUCAGGUCCA | 53 | 939 | GUGGCGGCGCUCAGGUCCA | 53 | 957 | UGGACCUGAGCGCCGCCAC | 316 |
| 957 | AACUUCGAGCGGAUCCGCA | 54 | 957 | AACUUCGAGCGGAUCCGCA | 54 | 975 | UGCGGAUCCGCUCGAAGUU | 317 |
| 975 | AAGGGCCAUGGCCAGCCCG | 55 | 975 | AAGGGCCAUGGCCAGCCCG | 55 | 993 | CGGGCUGGCCAUGGCCCUU | 318 |
| 993 | GGGGCGGACGCCGAGAAGC | 56 | 993 | GGGGCGGACGCCGAGAAGC | 56 | 1011 | GCUUCUCGGCGUCCGCCCC | 319 |
| 1011 | CCCUUCUACGUGAACGUCG | 57 | 1011 | CCCUUCUACGUGAACGUCG | 57 | 1029 | CGACGUUCACGUAGAAGGG | 320 |
| 1029 | GAGUUUCACCACGAGCGCG | 58 | 1029 | GAGUUUCACCACGAGCGCG | 58 | 1047 | CGCGCUCGUGGUGAAACUC | 321 |
| 1047 | GGCCUGGUGAAGGUCAACG | 59 | 1047 | GGCCUGGUGAAGGUCAACG | 59 | 1065 | CGUUGACCUUCACCAGGCC | 322 |
| 1065 | GACAAAGAGGUGUCGGACC | 60 | 1065 | GACAAAGAGGUGUCGGACC | 60 | 1083 | GGUCCGACACCUCUUUGUC | 323 |
| 1083 | CGCAUCAGCUCCCUGGGCA | 61 | 1083 | CGCAUCAGCUCCCUGGGCA | 61 | 1101 | UGCCCAGGGAGCUGAUGCG | 324 |
| 1101 | AGCCAGGCCAUGCAGAUGG | 62 | 1101 | AGCCAGGCCAUGCAGAUGG | 62 | 1119 | CCAUCUGCAUGGCCUGGCU | 325 |
| 1119 | GAGCGCAAAAAGUCCCAGC | 63 | 1119 | GAGCGCAAAAAGUCCCAGC | 63 | 1137 | GCUGGGACUUUUUGCGCUC | 326 |
| 1137 | CACGGCGCGGGCUCGAGCG | 64 | 1137 | CACGGCGCGGGCUCGAGCG | 64 | 1155 | CGCUCGAGCCCGCGCCGUG | 327 |
| 1155 | GUGGGGGAUGCAUCCAGGC | 65 | 1155 | GUGGGGGAUGCAUCCAGGC | 65 | 1173 | GCCUGGAUGCAUCCCCCAC | 328 |
| 1173 | CCCCCUUACCGGGGACGCU | 66 | 1173 | CCCCCUUACCGGGGACGCU | 66 | 1191 | AGCGUCCCCGGUAAGGGGG | 329 |
| 1191 | UCCUCGGAGAGCAGCUGCG | 67 | 1191 | UCCUCGGAGAGCAGCUGCG | 67 | 1209 | CGCAGCUGCUCUCCGAGGA | 330 |
| 1209 | GGCGUCGACGGCGACUACG | 68 | 1209 | GGCGUCGACGGCGACUACG | 68 | 1227 | CGUAGUCGCCGUCGACGCC | 331 |
| 1227 | GAGGACGCCGAGUUGAACC | 69 | 1227 | GAGGACGCCGAGUUGAACC | 69 | 1245 | GGUUCAACUCGGCGUCCUC | 332 |
| 1245 | CCCCGCUUCCUGAAGGACA | 70 | 1245 | CCCCGCUUCCUGAAGGACA | 70 | 1263 | UGUCCUUCAGGAAGCGGGG | 333 |
| 1263 | AACCUGAUCGACGCCAAUG | 71 | 1263 | AACCUGAUCGACGCCAAUG | 71 | 1281 | CAUUGGCGUCGAUCAGGUU | 334 |
| 1281 | GGCGGUAGCAGGCCCCCUU | 72 | 1281 | GGCGGUAGCAGGCCCCCUU | 72 | 1299 | AAGGGGGCCUGCUACCGCC | 335 |
| 1299 | UGGCCGCCCCUGGAGUACC | 73 | 1299 | UGGCCGCCCCUGGAGUACC | 73 | 1317 | GGUACUCCAGGGGCGGCCA | 336 |
| 1317 | CAGCCCUACCAGAGCAUCU | 74 | 1317 | CAGCCCUACCAGAGCAUCU | 74 | 1335 | AGAUGCUCUGGUAGGGCUG | 337 |
| 1335 | UACGUCGGGGGCAUGAUGG | 75 | 1335 | UACGUCGGGGGCAUGAUGG | 75 | 1353 | CCAUCAUGCCCCCGACGUA | 338 |
| 1353 | GAAGGGGAGGGCAAGGGCC | 76 | 1353 | GAAGGGGAGGGCAAGGGCC | 76 | 1371 | GGCCCUUGCCCUCCCCUUC | 339 |
| 1371 | CCGCUCCUGCGCAGCCAGA | 77 | 1371 | CCGCUCCUGCGCAGCCAGA | 77 | 1389 | UCUGGCUGCGCAGGAGCGG | 340 |
| 1389 | AGCACCUCUGAGCAGGAGA | 78 | 1389 | AGCACCUCUGAGCAGGAGA | 78 | 1407 | UCUCCUGCUCAGAGGUGCU | 341 |
| 1407 | AAGCGCCUUACCUGGCCCC | 79 | 1407 | AAGCGCCUUACCUGGCCCC | 79 | 1425 | GGGGCCAGGUAAGGCGCUU | 342 |
| 1425 | CGCAGGUCCUACUCCCCCC | 80 | 1425 | CGCAGGUCCUACUCCCCCC | 80 | 1443 | GGGGGGAGUAGGACCUGCG | 343 |
| 1443 | CGGAGUUUUGAGGAUUGCG | 81 | 1443 | CGGAGUUUUGAGGAUUGCG | 81 | 1461 | CGCAAUCCUCAAAACUCCG | 344 |
| 1461 | GGAGGCGGCUAUACCCCGG | 82 | 1461 | GGAGGCGGCUAUACCCCGG | 82 | 1479 | CCGGGGUAUAGCCGCCUCC | 345 |
| 1479 | GACUGCAGCUCCAAUGAGA | 83 | 1479 | GACUGCAGCUCCAAUGAGA | 83 | 1497 | UCUCAUUGGAGCUGCAGUC | 346 |
| 1497 | AACCUCACCUCCAGCGAGG | 84 | 1497 | AACCUCACCUCCAGCGAGG | 84 | 1515 | CCUCGCUGGAGGUGAGGUU | 347 |
| 1515 | GAGGACUUCUCCUCUGGCC | 85 | 1515 | GAGGACUUCUCCUCUGGCC | 85 | 1533 | GGCCAGAGGAGAAGUCCUC | 348 |
| 1533 | CAGUCCAGCCGCGUGUCCC | 86 | 1533 | CAGUCCAGCCGCGUGUCCC | 86 | 1551 | GGGACACGCGGCUGGACUG | 349 |
| 1551 | CCAAGCCCCACCACCUACC | 87 | 1551 | CCAAGCCCCACCACCUACC | 87 | 1569 | GGUAGGUGGUGGGGCUUGG | 350 |
| 1569 | CGCAUGUUCCGGGACAAAA | 88 | 1569 | CGCAUGUUCCGGGACAAAA | 88 | 1587 | UUUUGUCCCGGAACAUGCG | 351 |
| 1587 | AGCCGCUCUCCCUCGCAGA | 89 | 1587 | AGCCGCUCUCCCUCGCAGA | 89 | 1605 | UCUGCGAGGGAGAGCGGCU | 352 |
| 1605 | AACUCGCAACAGUCCUUCG | 90 | 1605 | AACUCGCAACAGUCCUUCG | 90 | 1623 | CGAAGGACUGUUGCGAGUU | 353 |
| 1623 | GACAGCAGCAGUCCCCCCA | 91 | 1623 | GACAGCAGCAGUCCCCCCA | 91 | 1641 | UGGGGGGACUGCUGCUGUC | 354 |
| 1641 | ACGCCGCAGUGCCAUAAGC | 92 | 1641 | ACGCCGCAGUGCCAUAAGC | 92 | 1659 | GCUUAUGGCACUGCGGCGU | 355 |
| 1659 | CGGCACCGGCACUGCCCGG | 93 | 1659 | CGGCACCGGCACUGCCCGG | 93 | 1677 | CCGGGCAGUGCCGGUGCCG | 356 |
| 1677 | GUUGUCGUGUCCGAGGCCA | 94 | 1677 | GUUGUCGUGUCCGAGGCCA | 94 | 1695 | UGGCCUCGGACACGACAAC | 357 |
| 1695 | ACCAUCGUGGGCGUCCGCA | 95 | 1695 | ACCAUCGUGGGCGUCCGCA | 95 | 1713 | UGCGGACGCCCACGAUGGU | 358 |
| 1713 | AAGACCGGGCAGAUCUGGC | 96 | 1713 | AAGACCGGGCAGAUCUGGC | 96 | 1731 | GCCAGAUCUGCCCGGUCUU | 359 |
| 1731 | CCCAACGAUGGCGAGGGCG | 97 | 1731 | CCCAACGAUGGCGAGGGCG | 97 | 1749 | CGCCCUCGCCAUCGUUGGG | 360 |
| 1749 | GCCUUCCAUGGAGACGCAG | 98 | 1749 | GCCUUCCAUGGAGACGCAG | 98 | 1767 | CUGCGUCUCCAUGGAAGGC | 361 |
| 1767 | GAUGGCUCGUUCGGAACAC | 99 | 1767 | GAUGGCUCGUUCGGAACAC | 99 | 1785 | GUGUUCCGAACGAGCCAUC | 362 |
| 1785 | CCACCUGGAUACGGCUGCG | 100 | 1785 | CCACCUGGAUACGGCUGCG | 100 | 1803 | CGCAGCCGUAUCCAGGUGG | 363 |
| 1803 | GCUGCAGACCGGGCAGAGG | 101 | 1803 | GCUGCAGACCGGGCAGAGG | 101 | 1821 | CCUCUGCCCGGUCUGCAGC | 364 |
| 1821 | GAGCAGCGCCGGCACCAAG | 102 | 1821 | GAGCAGCGCCGGCACCAAG | 102 | 1839 | CUUGGUGCCGGCGCUGCUC | 365 |
| 1839 | GAUGGGCUGCCCUACAUUG | 103 | 1839 | GAUGGGCUGCCCUACAUUG | 103 | 1857 | CAAUGUAGGGCAGCCCAUC | 366 |
| 1857 | GAUGACUCGCCCUCCUCAU | 104 | 1857 | GAUGACUCGCCCUCCUCAU | 104 | 1875 | AUGAGGAGGGCGAGUCAUC | 367 |
| 1875 | UCGCCCCACCUCAGCAGCA | 105 | 1875 | UCGCCCCACCUCAGCAGCA | 105 | 1893 | UGCUGCUGAGGUGGGGCGA | 368 |
| 1893 | AAGGGCAGGGGCAGCCGGG | 106 | 1893 | AAGGGCAGGGGCAGCCGGG | 106 | 1911 | CCCGGCUGCCCCUGCCCUU | 369 |
| 1911 | GAUGCGCUGGUCUCGGGAG | 107 | 1911 | GAUGCGCUGGUCUCGGGAG | 107 | 1929 | CUCCCGAGACCAGCGCAUC | 370 |
| 1929 | GCCCUGGAGUCCACUAAAG | 108 | 1929 | GCCCUGGAGUCCACUAAAG | 108 | 1947 | CUUUAGUGGACUCCAGGGC | 371 |
| 1947 | GCGAGUGAGCUGGACUUGG | 109 | 1947 | GCGAGUGAGCUGGACUUGG | 109 | 1965 | CCAAGUCCAGCUCACUCGC | 372 |
| 1965 | GAAAAGGGCUUGGAGAUGA | 110 | 1965 | GAAAAGGGCUUGGAGAUGA | 110 | 1983 | UCAUCUCCAAGCCCUUUUC | 373 |
| 1983 | AGAAAAUGGGUCCUGUCGG | 111 | 1983 | AGAAAAUGGGUCCUGUCGG | 111 | 2001 | CCGACAGGACCCAUUUUCU | 374 |
| 2001 | GGAAUCCUGGCUAGCGAGG | 112 | 2001 | GGAAUCCUGGCUAGCGAGG | 112 | 2019 | CCUCGCUAGCCAGGAUUCC | 375 |
| 2019 | GAGACUUACCUGAGCCACC | 113 | 2019 | GAGACUUACCUGAGCCACC | 113 | 2037 | GGUGGCUCAGGUAAGUCUC | 376 |
| 2037 | CUGGAGGCACUGCUGCUGC | 114 | 2037 | CUGGAGGCACUGCUGCUGC | 114 | 2055 | GCAGCAGCAGUGCCUCCAG | 377 |
| 2055 | CCCAUGAAGCCUUUGAAAG | 115 | 2055 | CCCAUGAAGCCUUUGAAAG | 115 | 2073 | CUUUCAAAGGCUUCAUGGG | 378 |
| 2073 | GCCGCUGCCACCACCUCUC | 116 | 2073 | GCCGCUGCCACCACCUCUC | 116 | 2091 | GAGAGGUGGUGGCAGCGGC | 379 |
| 2091 | CAGCCGGUGCUGACGAGUC | 117 | 2091 | CAGCCGGUGCUGACGAGUC | 117 | 2109 | GACUCGUCAGCACCGGCUG | 380 |
| 2109 | CAGCAGAUCGAGACCAUCU | 118 | 2109 | CAGCAGAUCGAGACCAUCU | 118 | 2127 | AGAUGGUCUCGAUCUGCUG | 381 |
| 2127 | UUCUUCAAAGUGCCUGAGC | 119 | 2127 | UUCUUCAAAGUGCCUGAGC | 119 | 2145 | GCUCAGGCACUUUGAAGAA | 382 |
| 2145 | CUCUACGAGAUCCACAAGG | 120 | 2145 | CUCUACGAGAUCCACAAGG | 120 | 2163 | CCUUGUGGAUCUCGUAGAG | 383 |
| 2163 | GAGUUCUAUGAUGGGCUCU | 121 | 2163 | GAGUUCUAUGAUGGGCUCU | 121 | 2181 | AGAGCCCAUCAUAGAACUC | 384 |
| 2181 | UUCCCCCGCGUGCAGCAGU | 122 | 2181 | UUCCCCCGCGUGCAGCAGU | 122 | 2199 | ACUGCUGCACGCGGGGGAA | 385 |
| 2199 | UGGAGCCACCAGCAGCGGG | 123 | 2199 | UGGAGCCACCAGCAGCGGG | 123 | 2217 | CCCGCUGCUGGUGGCUCCA | 386 |
| 2217 | GUGGGCGACCUCUUCCAGA | 124 | 2217 | GUGGGCGACCUCUUCCAGA | 124 | 2235 | UCUGGAAGAGGUCGCCCAC | 387 |
| 2235 | AAGCUGGCCAGCCAGCUGG | 125 | 2235 | AAGCUGGCCAGCCAGCUGG | 125 | 2253 | CCAGCUGGCUGGCCAGCUU | 388 |
| 2253 | GGUGUGUACCGGGCCUUCG | 126 | 2253 | GGUGUGUACCGGGCCUUCG | 126 | 2271 | CGAAGGCCCGGUACACACC | 389 |
| 2271 | GUGGACAACUACGGAGUUG | 127 | 2271 | GUGGACAACUACGGAGUUG | 127 | 2289 | CAACUCCGUAGUUGUCCAC | 390 |
| 2289 | GCCAUGGAAAUGGCUGAGA | 128 | 2289 | GCCAUGGAAAUGGCUGAGA | 128 | 2307 | UCUCAGCCAUUUCCAUGGC | 391 |
| 2307 | AAGUGCUGUCAGGCCAAUG | 129 | 2307 | AAGUGCUGUCAGGCCAAUG | 129 | 2325 | CAUUGGCCUGACAGCACUU | 392 |
| 2325 | GCUCAGUUUGCAGAAAUCU | 130 | 2325 | GCUCAGUUUGCAGAAAUCU | 130 | 2343 | AGAUUUCUGCAAACUGAGC | 393 |
| 2343 | UCCGAGAACCUGAGAGCCA | 131 | 2343 | UCCGAGAACCUGAGAGCCA | 131 | 2361 | UGGCUCUCAGGUUCUCGGA | 394 |
| 2361 | AGAAGCAACAAAGAUGCCA | 132 | 2361 | AGAAGCAACAAAGAUGCCA | 132 | 2379 | UGGCAUCUUUGUUGCUUCU | 395 |
| 2379 | AAGGAUCCAACGACCAAGA | 133 | 2379 | AAGGAUCCAACGACCAAGA | 133 | 2397 | UCUUGGUCGUUGGAUCCUU | 396 |
| 2397 | AACUCUCUGGAAACUCUGC | 134 | 2397 | AACUCUCUGGAAACUCUGC | 134 | 2415 | GCAGAGUUUCCAGAGAGUU | 397 |
| 2415 | CUCUACAAGCCUGUGGACC | 135 | 2415 | CUCUACAAGCCUGUGGACC | 135 | 2433 | GGUCCACAGGCUUGUAGAG | 398 |
| 2433 | CGUGUGACGAGGAGCACGC | 136 | 2433 | CGUGUGACGAGGAGCACGC | 136 | 2451 | GCGUGCUCCUCGUCACACG | 399 |
| 2451 | CUGGUCCUCCAUGACUUGC | 137 | 2451 | CUGGUCCUCCAUGACUUGC | 137 | 2469 | GCAAGUCAUGGAGGACCAG | 400 |
| 2469 | CUGAAGCACACUCCUGCCA | 138 | 2469 | CUGAAGCACACUCCUGCCA | 138 | 2487 | UGGCAGGAGUGUGCUUCAG | 401 |
| 2487 | AGCCACCCUGACCACCCCU | 139 | 2487 | AGCCACCCUGACCACCCCU | 139 | 2505 | AGGGGUGGUCAGGGUGGCU | 402 |
| 2505 | UUGCUGCAGGACGCCCUCC | 140 | 2505 | UUGCUGCAGGACGCCCUCC | 140 | 2523 | GGAGGGCGUCCUGCAGCAA | 403 |
| 2523 | CGCAUCUCACAGAACUUCC | 141 | 2523 | CGCAUCUCACAGAACUUCC | 141 | 2541 | GGAAGUUCUGUGAGAUGCG | 404 |
| 2541 | CUGUCCAGCAUCAAUGAGG | 142 | 2541 | CUGUCCAGCAUCAAUGAGG | 142 | 2559 | CCUCAUUGAUGCUGGACAG | 405 |
| 2559 | GAGAUCACACCCCGACGGC | 143 | 2559 | GAGAUCACACCCCGACGGC | 143 | 2577 | GCCGUCGGGGUGUGAUCUC | 406 |
| 2577 | CAGUCCAUGACGGUGAAGA | 144 | 2577 | CAGUCCAUGACGGUGAAGA | 144 | 2595 | UCUUCACCGUCAUGGACUG | 407 |
| 2595 | AAGGGAGAGCACCGGCAGC | 145 | 2595 | AAGGGAGAGCACCGGCAGC | 145 | 2613 | GCUGCCGGUGCUCUCCCUU | 408 |
| 2613 | CUGCUGAAGGACAGCUUCA | 146 | 2613 | CUGCUGAAGGACAGCUUCA | 146 | 2631 | UGAAGCUGUCCUUCAGCAG | 409 |
| 2631 | AUGGUGGAGCUGGUGGAGG | 147 | 2631 | AUGGUGGAGCUGGUGGAGG | 147 | 2649 | CCUCCACCAGCUCCACCAU | 410 |
| 2649 | GGGGCCCGCAAGCUGCGCC | 148 | 2649 | GGGGCCCGCAAGCUGCGCC | 148 | 2667 | GGCGCAGCUUGCGGGCCCC | 411 |
| 2667 | CACGUCUUCCUGUUCACCG | 149 | 2667 | CACGUCUUCCUGUUCACCG | 149 | 2685 | CGGUGAACAGGAAGACGUG | 412 |
| 2685 | GAGCUGCUUCUCUGCACCA | 150 | 2685 | GAGCUGCUUCUCUGCACCA | 150 | 2703 | UGGUGCAGAGAAGCAGCUC | 413 |
| 2703 | AAGCUCAAGAAGCAGAGCG | 151 | 2703 | AAGCUCAAGAAGCAGAGCG | 151 | 2721 | CGCUCUGCUUCUUGAGCUU | 414 |
| 2721 | GGAGGCAAAACGCAGCAGU | 152 | 2721 | GGAGGCAAAACGCAGCAGU | 152 | 2739 | ACUGCUGCGUUUUGCCUCC | 415 |
| 2739 | UAUGACUGCAAAUGGUACA | 153 | 2739 | UAUGACUGCAAAUGGUACA | 153 | 2757 | UGUACCAUUUGCAGUCAUA | 416 |
| 2757 | AUUCCGCUCACGGAUCUCA | 154 | 2757 | AUUCCGCUCACGGAUCUCA | 154 | 2775 | UGAGAUCCGUGAGCGGAAU | 417 |
| 2775 | AGCUUCCAGAUGGUGGAUG | 155 | 2775 | AGCUUCCAGAUGGUGGAUG | 155 | 2793 | CAUCCACCAUCUGGAAGCU | 418 |
| 2793 | GAACUGGAGGCAGUGCCCA | 156 | 2793 | GAACUGGAGGCAGUGCCCA | 156 | 2811 | UGGGCACUGCCUCCAGUUC | 419 |
| 2811 | AACAUCCCCCUGGUGCCCG | 157 | 2811 | AACAUCCCCCUGGUGCCCG | 157 | 2829 | CGGGCACCAGGGGGAUGUU | 420 |
| 2829 | GAUGAGGAGCUGGACGCUU | 158 | 2829 | GAUGAGGAGCUGGACGCUU | 158 | 2847 | AAGCGUCCAGCUCCUCAUC | 421 |
| 2847 | UUGAAGAUCAAGAUCUCCC | 159 | 2847 | UUGAAGAUCAAGAUCUCCC | 159 | 2865 | GGGAGAUCUUGAUCUUCAA | 422 |
| 2865 | CAGAUCAAGAGUGACAUCC | 160 | 2865 | CAGAUCAAGAGUGACAUCC | 160 | 2883 | GGAUGUCACUCUUGAUCUG | 423 |
| 2883 | CAGAGAGAGAAGAGGGCGA | 161 | 2883 | CAGAGAGAGAAGAGGGCGA | 161 | 2901 | UCGCCCUCUUCUCUCUCUG | 424 |
| 2901 | AACAAGGGCAGCAAGGCUA | 162 | 2901 | AACAAGGGCAGCAAGGCUA | 162 | 2919 | UAGCCUUGCUGCCCUUGUU | 425 |
| 2919 | ACGGAGAGGCUGAAGAAGA | 163 | 2919 | ACGGAGAGGCUGAAGAAGA | 163 | 2937 | UCUUCUUCAGCCUCUCCGU | 426 |
| 2937 | AAGCUGUCGGAGCAGGAGU | 164 | 2937 | AAGCUGUCGGAGCAGGAGU | 164 | 2955 | ACUCCUGCUCCGACAGCUU | 427 |
| 2955 | UCACUGCUGCUGCUUAUGU | 165 | 2955 | UCACUGCUGCUGCUUAUGU | 165 | 2973 | ACAUAAGCAGCAGCAGUGA | 428 |
| 2973 | UCUCCCAGCAUGGCCUUCA | 166 | 2973 | UCUCCCAGCAUGGCCUUCA | 166 | 2991 | UGAAGGCCAUGCUGGGAGA | 429 |
| 2991 | AGGGUGCACAGCCGCAACG | 167 | 2991 | AGGGUGCACAGCCGCAACG | 167 | 3009 | CGUUGCGGCUGUGCACCCU | 430 |
| 3009 | GGCAAGAGUUACACGUUCC | 168 | 3009 | GGCAAGAGUUACACGUUCC | 168 | 3027 | GGAACGUGUAACUCUUGCC | 431 |
| 3027 | CUGAUCUCCUCUGACUAUG | 169 | 3027 | CUGAUCUCCUCUGACUAUG | 169 | 3045 | CAUAGUCAGAGGAGAUCAG | 432 |
| 3045 | GAGCGUGCAGAGUGGAGGG | 170 | 3045 | GAGCGUGCAGAGUGGAGGG | 170 | 3063 | CCCUCCACUCUGCACGCUC | 433 |
| 3063 | GAGAACAUCCGGGAGCAGC | 171 | 3063 | GAGAACAUCCGGGAGCAGC | 171 | 3081 | GCUGCUCCCGGAUGUUCUC | 434 |
| 3081 | CAGAAGAAGUGUUUCAGAA | 172 | 3081 | CAGAAGAAGUGUUUCAGAA | 172 | 3099 | UUCUGAAACACUUCUUCUG | 435 |
| 3099 | AGCUUCUCCCUGACAUCCG | 173 | 3099 | AGCUUCUCCCUGACAUCCG | 173 | 3117 | CGGAUGUCAGGGAGAAGCU | 436 |
| 3117 | GUGGAGCUGCAGAUGCUGA | 174 | 3117 | GUGGAGCUGCAGAUGCUGA | 174 | 3135 | UCAGCAUCUGCAGCUCCAC | 437 |
| 3135 | ACCAACUCGUGUGUGAAAC | 175 | 3135 | ACCAACUCGUGUGUGAAAC | 175 | 3153 | GUUUCACACACGAGUUGGU | 438 |
| 3153 | CUCCAGACUGUCCACAGCA | 176 | 3153 | CUCCAGACUGUCCACAGCA | 176 | 3171 | UGCUGUGGACAGUCUGGAG | 439 |
| 3171 | AUUCCGCUGACCAUCAAUA | 177 | 3171 | AUUCCGCUGACCAUCAAUA | 177 | 3189 | UAUUGAUGGUCAGCGGAAU | 440 |
| 3189 | AAGGAAGAUGAUGAGUCUC | 178 | 3189 | AAGGAAGAUGAUGAGUCUC | 178 | 3207 | GAGACUCAUCAUCUUCCUU | 441 |
| 3207 | CCGGGGCUCUAUGGGUUUC | 179 | 3207 | CCGGGGCUCUAUGGGUUUC | 179 | 3225 | GAAACCCAUAGAGCCCCGG | 442 |
| 3225 | CUGAAUGUCAUCGUCCACU | 180 | 3225 | CUGAAUGUCAUCGUCCACU | 180 | 3243 | AGUGGACGAUGACAUUCAG | 443 |
| 3243 | UCAGCCACUGGAUUUAAGC | 181 | 3243 | UCAGCCACUGGAUUUAAGC | 181 | 3261 | GCUUAAAUCCAGUGGCUGA | 444 |
| 3261 | CAGAGUUCAAAUCUGUACU | 182 | 3261 | CAGAGUUCAAAUCUGUACU | 182 | 3279 | AGUACAGAUUUGAACUCUG | 445 |
| 3279 | UGCACCCUGGAGGUGGAUU | 183 | 3279 | UGCACCCUGGAGGUGGAUU | 183 | 3297 | AAUCCACCUCCAGGGUGCA | 446 |
| 3297 | UCCUUUGGGUAUUUUGUGA | 184 | 3297 | UCCUUUGGGUAUUUUGUGA | 184 | 3315 | UCACAAAAUACCCAAAGGA | 447 |
| 3315 | AAUAAAGCAAAGACGCGCG | 185 | 3315 | AAUAAAGCAAAGACGCGCG | 185 | 3333 | CGCGCGUCUUUGCUUUAUU | 448 |
| 3333 | GUCUACAGGGACACAGCUG | 186 | 3333 | GUCUACAGGGACACAGCUG | 186 | 3351 | CAGCUGUGUCCCUGUAGAC | 449 |
| 3351 | GAGCCAAACUGGAACGAGG | 187 | 3351 | GAGCCAAACUGGAACGAGG | 187 | 3369 | CCUCGUUCCAGUUUGGCUC | 450 |
| 3369 | GAAUUUGAGAUAGAGCUGG | 188 | 3369 | GAAUUUGAGAUAGAGCUGG | 188 | 3387 | CCAGCUCUAUCUCAAAUUC | 451 |
| 3387 | GAGGGCUCCCAGACCCUGA | 189 | 3387 | GAGGGCUCCCAGACCCUGA | 189 | 3405 | UCAGGGUCUGGGAGCCCUC | 452 |
| 3405 | AGGAUACUGUGCUAUGAAA | 190 | 3405 | AGGAUACUGUGCUAUGAAA | 190 | 3423 | UUUCAUAGCACAGUAUCCU | 453 |
| 3423 | AAGUGUUACAACAAGACGA | 191 | 3423 | AAGUGUUACAACAAGACGA | 191 | 3441 | UCGUCUUGUUGUAACACUU | 454 |
| 3441 | AAGAUCCCCAAGGAGGACG | 192 | 3441 | AAGAUCCCCAAGGAGGACG | 192 | 3459 | CGUCCUCCUUGGGGAUCUU | 455 |
| 3459 | GGCGAGAGCACGGACAGAC | 193 | 3459 | GGCGAGAGCACGGACAGAC | 193 | 3477 | GUCUGUCCGUGCUCUCGCC | 456 |
| 3477 | CUCAUGGGGAAGGGCCAGG | 194 | 3477 | CUCAUGGGGAAGGGCCAGG | 194 | 3495 | CCUGGCCCUUCCCCAUGAG | 457 |
| 3495 | GUCCAGCUGGACCCGCAGG | 195 | 3495 | GUCCAGCUGGACCCGCAGG | 195 | 3513 | CCUGCGGGUCCAGCUGGAC | 458 |
| 3513 | GCCCUGCAGGACAGAGACU | 196 | 3513 | GCCCUGCAGGACAGAGACU | 196 | 3531 | AGUCUCUGUCCUGCAGGGC | 459 |
| 3531 | UGGCAGCGCACCGUCAUCG | 197 | 3531 | UGGCAGCGCACCGUCAUCG | 197 | 3549 | CGAUGACGGUGCGCUGCCA | 460 |
| 3549 | GCCAUGAAUGGGAUCGAAG | 198 | 3549 | GCCAUGAAUGGGAUCGAAG | 198 | 3567 | CUUCGAUCCCAUUCAUGGC | 461 |
| 3567 | GUAAAGCUCUCGGUCAAGU | 199 | 3567 | GUAAAGCUCUCGGUCAAGU | 199 | 3585 | ACUUGACCGAGAGCUUUAC | 462 |
| 3585 | UUCAACAGCAGGGAGUUCA | 200 | 3585 | UUCAACAGCAGGGAGUUCA | 200 | 3603 | UGAACUCCCUGCUGUUGAA | 463 |
| 3603 | AGCUUGAAGAGGAUGCCGU | 201 | 3603 | AGCUUGAAGAGGAUGCCGU | 201 | 3621 | ACGGCAUCCUCUUCAAGCU | 464 |
| 3621 | UCCCGAAAACAGACAGGGG | 202 | 3621 | UCCCGAAAACAGACAGGGG | 202 | 3639 | CCCCUGUCUGUUUUCGGGA | 465 |
| 3639 | GUCUUCGGAGUCAAGAUUG | 203 | 3639 | GUCUUCGGAGUCAAGAUUG | 203 | 3657 | CAAUCUUGACUCCGAAGAC | 466 |
| 3657 | GCUGUGGUCACCAAGAGAG | 204 | 3657 | GCUGUGGUCACCAAGAGAG | 204 | 3675 | CUCUCUUGGUGACCACAGC | 467 |
| 3675 | GAGAGGUCCAAGGUGCCCU | 205 | 3675 | GAGAGGUCCAAGGUGCCCU | 205 | 3693 | AGGGCACCUUGGACCUCUC | 468 |
| 3693 | UACAUCGUGCGCCAGUGCG | 206 | 3693 | UACAUCGUGCGCCAGUGCG | 206 | 3711 | CGCACUGGCGCACGAUGUA | 469 |
| 3711 | GUGGAGGAGAUCGAGCGCC | 207 | 3711 | GUGGAGGAGAUCGAGCGCC | 207 | 3729 | GGCGCUCGAUCUCCUCCAC | 470 |
| 3729 | CGAGGCAUGGAGGAGGUGG | 208 | 3729 | CGAGGCAUGGAGGAGGUGG | 208 | 3747 | CCACCUCCUCCAUGCCUCG | 471 |
| 3747 | GGCAUCUACCGCGUGUCCG | 209 | 3747 | GGCAUCUACCGCGUGUCCG | 209 | 3765 | CGGACACGCGGUAGAUGCC | 472 |
| 3765 | GGUGUGGCCACGGACAUCC | 210 | 3765 | GGUGUGGCCACGGACAUCC | 210 | 3783 | GGAUGUCCGUGGCCACACC | 473 |
| 3783 | CAGGCACUGAAGGCAGCCU | 211 | 3783 | CAGGCACUGAAGGCAGCCU | 211 | 3801 | AGGCUGCCUUCAGUGCCUG | 474 |
| 3801 | UUCGACGUCAAUAACAAGG | 212 | 3801 | UUCGACGUCAAUAACAAGG | 212 | 3819 | CCUUGUUAUUGACGUCGAA | 475 |
| 3819 | GAUGUGUCGGUGAUGAUGA | 213 | 3819 | GAUGUGUCGGUGAUGAUGA | 213 | 3837 | UCAUCAUCACCGACACAUC | 476 |
| 3837 | AGCGAGAUGGACGUGAACG | 214 | 3837 | AGCGAGAUGGACGUGAACG | 214 | 3855 | CGUUCACGUCCAUCUCGCU | 477 |
| 3855 | GCCAUCGCAGGCACGCUGA | 215 | 3855 | GCCAUCGCAGGCACGCUGA | 215 | 3873 | UCAGCGUGCCUGCGAUGGC | 478 |
| 3873 | AAGCUGUACUUCCGUGAGC | 216 | 3873 | AAGCUGUACUUCCGUGAGC | 216 | 3891 | GCUCACGGAAGUACAGCUU | 479 |
| 3891 | CUGCCCGAGCCCCUCUUCA | 217 | 3891 | CUGCCCGAGCCCCUCUUCA | 217 | 3909 | UGAAGAGGGGCUCGGGCAG | 480 |
| 3909 | ACUGACGAGUUCUACCCCA | 218 | 3909 | ACUGACGAGUUCUACCCCA | 218 | 3927 | UGGGGUAGAACUCGUCAGU | 481 |
| 3927 | AACUUCGCAGAGGGCAUCG | 219 | 3927 | AACUUCGCAGAGGGCAUCG | 219 | 3945 | CGAUGCCCUCUGCGAAGUU | 482 |
| 3945 | GCUCUUUCAGACCCGGUUG | 220 | 3945 | GCUCUUUCAGACCCGGUUG | 220 | 3963 | CAACCGGGUCUGAAAGAGC | 483 |
| 3963 | GCAAAGGAGAGCUGCAUGC | 221 | 3963 | GCAAAGGAGAGCUGCAUGC | 221 | 3981 | GCAUGCAGCUCUCCUUUGC | 484 |
| 3981 | CUCAACCUGCUGCUGUCCC | 222 | 3981 | CUCAACCUGCUGCUGUCCC | 222 | 3999 | GGGACAGCAGCAGGUUGAG | 485 |
| 3999 | CUGCCGGAGGCCAACCUGC | 223 | 3999 | CUGCCGGAGGCCAACCUGC | 223 | 4017 | GCAGGUUGGCCUCCGGCAG | 486 |
| 4017 | CUCACCUUCCUUUUCCUUC | 224 | 4017 | CUCACCUUCCUUUUCCUUC | 224 | 4035 | GAAGGAAAAGGAAGGUGAG | 487 |
| 4035 | CUGGACCACCUGAAAAGGG | 225 | 4035 | CUGGACCACCUGAAAAGGG | 225 | 4053 | CCCUUUUCAGGUGGUCCAG | 488 |
| 4053 | GUGGCAGAGAAGGAGGCAG | 226 | 4053 | GUGGCAGAGAAGGAGGCAG | 226 | 4071 | CUGCCUCCUUCUCUGCCAC | 489 |
| 4071 | GUCAAUAAGAUGUCCCUGC | 227 | 4071 | GUCAAUAAGAUGUCCCUGC | 227 | 4089 | GCAGGGACAUCUUAUUGAC | 490 |
| 4089 | CACAACCUCGCCACGGUCU | 228 | 4089 | CACAACCUCGCCACGGUCU | 228 | 4107 | AGACCGUGGCGAGGUUGUG | 491 |
| 4107 | UUUGGCCCCACGCUGCUCC | 229 | 4107 | UUUGGCCCCACGCUGCUCC | 229 | 4125 | GGAGCAGCGUGGGGCCAAA | 492 |
| 4125 | CGGCCCUCCGAGAAGGAGA | 230 | 4125 | CGGCCCUCCGAGAAGGAGA | 230 | 4143 | UCUCCUUCUCGGAGGGCCG | 493 |
| 4143 | AGCAAGCUCCCUGCCAACC | 231 | 4143 | AGCAAGCUCCCUGCCAACC | 231 | 4161 | GGUUGGCAGGGAGCUUGCU | 494 |
| 4161 | CCCAGCCAGCCUAUCACCA | 232 | 4161 | CCCAGCCAGCCUAUCACCA | 232 | 4179 | UGGUGAUAGGCUGGCUGGG | 495 |
| 4179 | AUGACUGACAGCUGGUCCU | 233 | 4179 | AUGACUGACAGCUGGUCCU | 233 | 4197 | AGGACCAGCUGUCAGUCAU | 496 |
| 4197 | UUGGAGGUCAUGUCCCAGG | 234 | 4197 | UUGGAGGUCAUGUCCCAGG | 234 | 4215 | CCUGGGACAUGACCUCCAA | 497 |
| 4215 | GUCCAGGUGCUGCUGUACU | 235 | 4215 | GUCCAGGUGCUGCUGUACU | 235 | 4233 | AGUACAGCAGCACCUGGAC | 498 |
| 4233 | UUCCUGCAGCUGGAGGCCA | 236 | 4233 | UUCCUGCAGCUGGAGGCCA | 236 | 4251 | UGGCCUCCAGCUGCAGGAA | 499 |
| 4251 | AUCCCUGCCCCGGACAGCA | 237 | 4251 | AUCCCUGCCCCGGACAGCA | 237 | 4269 | UGCUGUCCGGGGCAGGGAU | 500 |
| 4269 | AAGAGACAGAGCAUCCUGU | 238 | 4269 | AAGAGACAGAGCAUCCUGU | 238 | 4287 | ACAGGAUGCUCUGUCUCUU | 501 |
| 4287 | UUCUCCACCGAAGUCUAAA | 239 | 4287 | UUCUCCACCGAAGUCUAAA | 239 | 4305 | UUUAGACUUCGGUGGAGAA | 502 |
| 4305 | AGGUCCCAGUCCAUCUCCU | 240 | 4305 | AGGUCCCAGUCCAUCUCCU | 240 | 4323 | AGGAGAUGGACUGGGACCU | 503 |
| 4323 | UGGAGGCAGACAGAUGGCC | 241 | 4323 | UGGAGGCAGACAGAUGGCC | 241 | 4341 | GGCCAUCUGUCUGCCUCCA | 504 |
| 4341 | CUGGAAACCUCUGGCUAAU | 242 | 4341 | CUGGAAACCUCUGGCUAAU | 242 | 4359 | AUUAGCCAGAGGUUUCCAG | 505 |
| 4359 | UCGGGCCAUCCGUAGAGCG | 243 | 4359 | UCGGGCCAUCCGUAGAGCG | 243 | 4377 | CGCUCUACGGAUGGCCCGA | 506 |
| 4377 | GGGAACCUUCCUGAGGUGU | 244 | 4377 | GGGAACCUUCCUGAGGUGU | 244 | 4395 | ACACCUCAGGAAGGUUCCC | 507 |
| 4395 | UCCUUGGGCCACCCCCAAG | 245 | 4395 | UCCUUGGGCCACCCCCAAG | 245 | 4413 | CUUGGGGGUGGCCCAAGGA | 508 |
| 4413 | GUGUUGGGCCAUCUGCCAA | 246 | 4413 | GUGUUGGGCCAUCUGCCAA | 246 | 4431 | UUGGCAGAUGGCCCAACAC | 509 |
| 4431 | AGAGACAGCGACCCAAAGC | 247 | 4431 | AGAGACAGCGACCCAAAGC | 247 | 4449 | GCUUUGGGUCGCUGUCUCU | 510 |
| 4449 | CCGAAGGACAGGUGGCCUG | 248 | 4449 | CCGAAGGACAGGUGGCCUG | 248 | 4467 | CAGGCCACCUGUCCUUCGG | 511 |
| 4467 | GGGCAGAUCUCGCCCAGGU | 249 | 4467 | GGGCAGAUCUCGCCCAGGU | 249 | 4485 | ACCUGGGCGAGAUCUGCCC | 512 |
| 4485 | UCUGGGAGCCCCAGGCUGG | 250 | 4485 | UCUGGGAGCCCCAGGCUGG | 250 | 4503 | CCAGCCUGGGGCUCCCAGA | 513 |
| 4503 | GCCUCAGACUGUGGUUUUU | 251 | 4503 | GCCUCAGACUGUGGUUUUU | 251 | 4521 | AAAAACCACAGUCUGAGGC | 514 |
| 4521 | UUAUGUGGCCACCCGAGGG | 252 | 4521 | UUAUGUGGCCACCCGAGGG | 252 | 4539 | CCCUCGGGUGGCCACAUAA | 515 |
| 4539 | GCGCCCCAAGCCAGUUCAU | 253 | 4539 | GCGCCCCAAGCCAGUUCAU | 253 | 4557 | AUGAACUGGCUUGGGGCGC | 516 |
| 4557 | UCUCAGAGUCCAGGCCUGA | 254 | 4557 | UCUCAGAGUCCAGGCCUGA | 254 | 4575 | UCAGGCCUGGACUCUGAGA | 517 |
| 4575 | ACCCUGGGAGACAGGGUGA | 255 | 4575 | ACCCUGGGAGACAGGGUGA | 255 | 4593 | UCACCCUGUCUCCCAGGGU | 518 |
| 4593 | AAGGGAGUGAUUUUUAUGA | 256 | 4593 | AAGGGAGUGAUUUUUAUGA | 256 | 4611 | UCAUAAAAAUCACUCCCUU | 519 |
| 4611 | AACUUAACUUAGAGUCUAA | 257 | 4611 | AACUUAACUUAGAGUCUAA | 257 | 4629 | UUAGACUCUAAGUUAAGUU | 520 |
| 4629 | AAAGAUUUCUACUGGAUCA | 258 | 4629 | AAAGAUUUCUACUGGAUCA | 258 | 4647 | UGAUCCAGUAGAAAUCUUU | 521 |
| 4647 | ACUUGUCAAGAUGCGCCCU | 259 | 4647 | ACUUGUCAAGAUGCGCCCU | 259 | 4665 | AGGGCGCAUCUUGACAAGU | 522 |
| 4665 | UCUCUGGGGAGAAGGGAAC | 260 | 4665 | UCUCUGGGGAGAAGGGAAC | 260 | 4683 | GUUCCCUUCUCCCCAGAGA | 523 |
| 4683 | CGUGACCGGAUUCCCUCAC | 261 | 4683 | CGUGACCGGAUUCCCUCAC | 261 | 4701 | GUGAGGGAAUCCGGUCACG | 524 |
| 4701 | CUGUUGUAUCUUGAAUAAA | 262 | 4701 | CUGUUGUAUCUUGAAUAAA | 262 | 4719 | UUUAUUCAAGAUACAACAG | 525 |
| 4719 | ACGCUGCUGCUUCAUCCUG | 263 | 4719 | ACGCUGCUGCUUCAUCCUG | 263 | 4737 | CAGGAUGAAGCAGCAGCGU | 526 |

NM_005157 (ABL)

| | | | | | | | | |
|---|---|---|---|---|---|---|---|---|
| 3 | CCUUCCCCCUGCGAGGAUC | 527 | 3 | CCUUCCCCCUGCGAGGAUC | 527 | 21 | GAUCCUCGCAGGGGGAAGG | 846 |
| 21 | CGCCGUUGGCCCGGGUUGG | 528 | 21 | CGCCGUUGGCCCGGGUUGG | 528 | 39 | CCAACCCGGGCCAACGGCG | 847 |
| 39 | GCUUUGGAAAGCGGCGGUG | 529 | 39 | GCUUUGGAAAGCGGCGGUG | 529 | 57 | CACCGCCGCUUUCCAAAGC | 848 |
| 57 | GGCUUUGGGCCGGGCUCGG | 530 | 57 | GGCUUUGGGCCGGGCUCGG | 530 | 75 | CCGAGCCCGGCCCAAAGCC | 849 |
| 75 | GCCUCGGGAACGCCAGGGG | 531 | 75 | GCCUCGGGAACGCCAGGGG | 531 | 93 | CCCCUGGCGUUCCCGAGGC | 850 |
| 93 | GCCCCUGGGUGCGGACGGG | 532 | 93 | GCCCCUGGGUGCGGACGGG | 532 | 111 | CCCGUCCGCACCCAGGGGC | 851 |
| 111 | GCGCGGCCAGGAGGGGGUU | 533 | 111 | GCGCGGCCAGGAGGGGGUU | 533 | 129 | AACCCCCUCCUGGCCGCGC | 852 |
| 129 | UAAGGCGCAGGCGGCGGCG | 534 | 129 | UAAGGCGCAGGCGGCGGCG | 534 | 147 | CGCCGCCGCCUGCGCCUUA | 853 |
| 147 | GGGGCGGGGGCGGGCCUGG | 535 | 147 | GGGGCGGGGGCGGGCCUGG | 535 | 165 | CCAGGCCCGCCCCCGCCCC | 854 |
| 165 | GCGGGCGCCCUCUCCGGGC | 536 | 165 | GCGGGCGCCCUCUCCGGGC | 536 | 183 | GCCCGGAGAGGGCGCCCGC | 855 |
| 183 | CCCUUUGUUAACAGGCGCG | 537 | 183 | CCCUUUGUUAACAGGCGCG | 537 | 201 | CGCGCCUGUUAACAAAGGG | 856 |
| 201 | GUCCCGGCCAGCGGAGACG | 538 | 201 | GUCCCGGCCAGCGGAGACG | 538 | 219 | CGUCUCCGCUGGCCGGGAC | 857 |
| 219 | GCGGCCGCCCUGGGCGGGC | 539 | 219 | GCGGCCGCCCUGGGCGGGC | 539 | 237 | GCCCGCCCAGGGCGGCCGC | 858 |
| 237 | CGCGGGCGGCGGGCGGCGG | 540 | 237 | CGCGGGCGGCGGGCGGCGG | 540 | 255 | CCGCCGCCCGCCGCCCGCG | 859 |
| 255 | GUGAGGGCGGCCUGCGGGG | 541 | 255 | GUGAGGGCGGCCUGCGGGG | 541 | 273 | CCCCGCAGGCCGCCCUCAC | 860 |
| 273 | GCGGCGCCCGGGGGCCGGG | 542 | 273 | GCGGCGCCCGGGGGCCGGG | 542 | 291 | CCCGGCCCCCGGGCGCCGC | 861 |
| 291 | GCCGAGCCGGGCCUGAGCC | 543 | 291 | GCCGAGCCGGGCCUGAGCC | 543 | 309 | GGCUCAGGCCCGGCUCGGC | 862 |
| 309 | CGGGCCCGGACCGAGCUGG | 544 | 309 | CGGGCCCGGACCGAGCUGG | 544 | 327 | CCAGCUCGGUCCGGGCCCG | 863 |
| 327 | GGAGAGGGGCUCCGGCCCG | 545 | 327 | GGAGAGGGGCUCCGGCCCG | 545 | 345 | CGGGCCGGAGCCCCUCUCC | 864 |
| 345 | GAUCGUUCGCUUGGCGCAA | 546 | 345 | GAUCGUUCGCUUGGCGCAA | 546 | 363 | UUGCGCCAAGCGAACGAUC | 865 |
| 363 | AAAUGUUGGAGAUCUGCCU | 547 | 363 | AAAUGUUGGAGAUCUGCCU | 547 | 381 | AGGCAGAUCUCCAACAUUU | 866 |
| 381 | UGAAGCUGGUGGGCUGCAA | 548 | 381 | UGAAGCUGGUGGGCUGCAA | 548 | 399 | UUGCAGCCCACCAGCUUCA | 867 |
| 399 | AAUCCAAGAAGGGGCUGUC | 549 | 399 | AAUCCAAGAAGGGGCUGUC | 549 | 417 | GACAGCCCCUUCUUGGAUU | 868 |
| 417 | CCUCGUCCUCCAGCUGUUA | 550 | 417 | CCUCGUCCUCCAGCUGUUA | 550 | 435 | UAACAGCUGGAGGACGAGG | 869 |
| 435 | AUCUGGAAGAAGCCCUUCA | 551 | 435 | AUCUGGAAGAAGCCCUUCA | 551 | 453 | UGAAGGGCUUCUUCCAGAU | 870 |
| 453 | AGCGGCCAGUAGCAUCUGA | 552 | 453 | AGCGGCCAGUAGCAUCUGA | 552 | 471 | UCAGAUGCUACUGGCCGCU | 871 |
| 471 | ACUUUGAGCCUCAGGGUCU | 553 | 471 | ACUUUGAGCCUCAGGGUCU | 553 | 489 | AGACCCUGAGGCUCAAAGU | 872 |
| 489 | UGAGUGAAGCCGCUCGUUG | 554 | 489 | UGAGUGAAGCCGCUCGUUG | 554 | 507 | CAACGAGCGGCUUCACUCA | 873 |
| 507 | GGAACUCCAAGGAAAACCU | 555 | 507 | GGAACUCCAAGGAAAACCU | 555 | 525 | AGGUUUUCCUUGGAGUUCC | 874 |
| 525 | UUCUCGCUGGACCCAGUGA | 556 | 525 | UUCUCGCUGGACCCAGUGA | 556 | 543 | UCACUGGGUCCAGCGAGAA | 875 |
| 543 | AAAAUGACCCCAACCUUUU | 557 | 543 | AAAAUGACCCCAACCUUUU | 557 | 561 | AAAAGGUUGGGGUCAUUUU | 876 |
| 561 | UCGUUGCACUGUAUGAUUU | 558 | 561 | UCGUUGCACUGUAUGAUUU | 558 | 579 | AAAUCAUACAGUGCAACGA | 877 |
| 579 | UUGUGGCCAGUGGAGAUAA | 559 | 579 | UUGUGGCCAGUGGAGAUAA | 559 | 597 | UUAUCUCCACUGGCCACAA | 878 |
| 597 | ACACUCUAAGCAUAACUAA | 560 | 597 | ACACUCUAAGCAUAACUAA | 560 | 615 | UUAGUUAUGCUUAGAGUGU | 879 |
| 615 | AAGGUGAAAAGCUCCGGGU | 561 | 615 | AAGGUGAAAAGCUCCGGGU | 561 | 633 | ACCCGGAGCUUUUCACCUU | 880 |
| 633 | UCUUAGGCUAUAAUCACAA | 562 | 633 | UCUUAGGCUAUAAUCACAA | 562 | 651 | UUGUGAUUAUAGCCUAAGA | 881 |
| 651 | AUGGGGAAUGGUGUGAAGC | 563 | 651 | AUGGGGAAUGGUGUGAAGC | 563 | 669 | GCUUCACACCAUUCCCCAU | 882 |
| 669 | CCCAAACCAAAAAUGGCCA | 564 | 669 | CCCAAACCAAAAAUGGCCA | 564 | 687 | UGGCCAUUUUUGGUUUGGG | 883 |
| 687 | AAGGCUGGGUCCCAAGCAA | 565 | 687 | AAGGCUGGGUCCCAAGCAA | 565 | 705 | UUGCUUGGGACCCAGCCUU | 884 |
| 705 | ACUACAUCACGCCAGUCAA | 566 | 705 | ACUACAUCACGCCAGUCAA | 566 | 723 | UUGACUGGCGUGAUGUAGU | 885 |
| 723 | ACAGUCUGGAGAAACACUC | 567 | 723 | ACAGUCUGGAGAAACACUC | 567 | 741 | GAGUGUUUCUCCAGACUGU | 886 |
| 741 | CCUGGUACCAUGGGCCUGU | 568 | 741 | CCUGGUACCAUGGGCCUGU | 568 | 759 | ACAGGCCCAUGGUACCAGG | 887 |
| 759 | UGUCCCGCAAUGCCGCUGA | 569 | 759 | UGUCCCGCAAUGCCGCUGA | 569 | 777 | UCAGCGGCAUUGCGGGACA | 888 |
| 777 | AGUAUCCGCUGAGCAGCGG | 570 | 777 | AGUAUCCGCUGAGCAGCGG | 570 | 795 | CCGCUGCUCAGCGGAUACU | 889 |
| 795 | GGAUCAAUGGCAGCUUCUU | 571 | 795 | GGAUCAAUGGCAGCUUCUU | 571 | 813 | AAGAAGCUGCCAUUGAUCC | 890 |
| 813 | UGGUGCGUGAGAGUGAGAG | 572 | 813 | UGGUGCGUGAGAGUGAGAG | 572 | 831 | CUCUCACUCUCACGCACCA | 891 |
| 831 | GCAGUCCUAGCCAGAGGUC | 573 | 831 | GCAGUCCUAGCCAGAGGUC | 573 | 849 | GACCUCUGGCUAGGACUGC | 892 |
| 849 | CCAUCUCGCUGAGAUACGA | 574 | 849 | CCAUCUCGCUGAGAUACGA | 574 | 867 | UCGUAUCUCAGCGAGAUGG | 893 |
| 867 | AAGGGAGGGUGUACCAUUA | 575 | 867 | AAGGGAGGGUGUACCAUUA | 575 | 885 | UAAUGGUACACCCUCCCUU | 894 |
| 885 | ACAGGAUCAACACUGCUUC | 576 | 885 | ACAGGAUCAACACUGCUUC | 576 | 903 | GAAGCAGUGUUGAUCCUGU | 895 |
| 903 | CUGAUGGCAAGCUCUACGU | 577 | 903 | CUGAUGGCAAGCUCUACGU | 577 | 921 | ACGUAGAGCUUGCCAUCAG | 896 |
| 921 | UCUCCUCCGAGAGCCGCUU | 578 | 921 | UCUCCUCCGAGAGCCGCUU | 578 | 939 | AAGCGGCUCUCGGAGGAGA | 897 |
| 939 | UCAACACCCUGGCCGAGUU | 579 | 939 | UCAACACCCUGGCCGAGUU | 579 | 957 | AACUCGGCCAGGGUGUUGA | 898 |
| 957 | UGGUUCAUCAUCAUUCAAC | 580 | 957 | UGGUUCAUCAUCAUUCAAC | 580 | 975 | GUUGAAUGAUGAUGAACCA | 899 |
| 975 | CGGUGGCCGACGGGCUCAU | 581 | 975 | CGGUGGCCGACGGGCUCAU | 581 | 993 | AUGAGCCCGUCGGCCACCG | 900 |
| 993 | UCACCACGCUCCAUUAUCC | 582 | 993 | UCACCACGCUCCAUUAUCC | 582 | 1011 | GGAUAAUGGAGCGUGGUGA | 901 |
| 1011 | CAGCCCCAAAGCGCAACAA | 583 | 1011 | CAGCCCCAAAGCGCAACAA | 583 | 1029 | UUGUUGCGCUUUGGGGCUG | 902 |
| 1029 | AGCCCACUGUCUAUGGUGU | 584 | 1029 | AGCCCACUGUCUAUGGUGU | 584 | 1047 | ACACCAUAGACAGUGGGCU | 903 |
| 1047 | UGUCCCCCAACUACGACAA | 585 | 1047 | UGUCCCCCAACUACGACAA | 585 | 1065 | UUGUCGUAGUUGGGGGACA | 904 |
| 1065 | AGUGGGAGAUGGAACGCAC | 586 | 1065 | AGUGGGAGAUGGAACGCAC | 586 | 1083 | GUGCGUUCCAUCUCCCACU | 905 |
| 1083 | CGGACAUCACCAUGAAGCA | 587 | 1083 | CGGACAUCACCAUGAAGCA | 587 | 1101 | UGCUUCAUGGUGAUGUCCG | 906 |
| 1101 | ACAAGCUGGGCGGGGGCCA | 588 | 1101 | ACAAGCUGGGCGGGGGCCA | 588 | 1119 | UGGCCCCCGCCCAGCUUGU | 907 |
| 1119 | AGUACGGGGAGGUGUACGA | 589 | 1119 | AGUACGGGGAGGUGUACGA | 589 | 1137 | UCGUACACCUCCCCGUACU | 908 |
| 1137 | AGGGCGUGUGGAAGAAAUA | 590 | 1137 | AGGGCGUGUGGAAGAAAUA | 590 | 1155 | UAUUUCUUCCACACGCCCU | 909 |
| 1155 | ACAGCCUGACGGUGGCCGU | 591 | 1155 | ACAGCCUGACGGUGGCCGU | 591 | 1173 | ACGGCCACCGUCAGGCUGU | 910 |
| 1173 | UGAAGACCUUGAAGGAGGA | 592 | 1173 | UGAAGACCUUGAAGGAGGA | 592 | 1191 | UCCUCCUUCAAGGUCUUCA | 911 |
| 1191 | ACACCAUGGAGGUGGAAGA | 593 | 1191 | ACACCAUGGAGGUGGAAGA | 593 | 1209 | UCUUCCACCUCCAUGGUGU | 912 |
| 1209 | AGUUCUUGAAAGAAGCUGC | 594 | 1209 | AGUUCUUGAAAGAAGCUGC | 594 | 1227 | GCAGCUUCUUUCAAGAACU | 913 |
| 1227 | CAGUCAUGAAAGAGAUCAA | 595 | 1227 | CAGUCAUGAAAGAGAUCAA | 595 | 1245 | UUGAUCUCUUUCAUGACUG | 914 |
| 1245 | AACACCCUAACCUAGUGCA | 596 | 1245 | AACACCCUAACCUAGUGCA | 596 | 1263 | UGCACUAGGUUAGGGUGUU | 915 |
| 1263 | AGCUCCUUGGGGUCUGCAC | 597 | 1263 | AGCUCCUUGGGGUCUGCAC | 597 | 1281 | GUGCAGACCCCAAGGAGCU | 916 |
| 1281 | CCCGGGAGCCCCCGUUCUA | 598 | 1281 | CCCGGGAGCCCCCGUUCUA | 598 | 1299 | UAGAACGGGGGCUCCCGGG | 917 |
| 1299 | AUAUCAUCACUGAGUUCAU | 599 | 1299 | AUAUCAUCACUGAGUUCAU | 599 | 1317 | AUGAACUCAGUGAUGAUAU | 918 |
| 1317 | UGACCUACGGGAACCUCCU | 600 | 1317 | UGACCUACGGGAACCUCCU | 600 | 1335 | AGGAGGUUCCCGUAGGUCA | 919 |
| 1335 | UGGACUACCUGAGGGAGUG | 601 | 1335 | UGGACUACCUGAGGGAGUG | 601 | 1353 | CACUCCCUCAGGUAGUCCA | 920 |
| 1353 | GCAACCGGCAGGAGGUGAA | 602 | 1353 | GCAACCGGCAGGAGGUGAA | 602 | 1371 | UUCACCUCCUGCCGGUUGC | 921 |
| 1371 | ACGCCGUGGUGCUGCUGUA | 603 | 1371 | ACGCCGUGGUGCUGCUGUA | 603 | 1389 | UACAGCAGCACCACGGCGU | 922 |
| 1389 | ACAUGGCCACUCAGAUCUC | 604 | 1389 | ACAUGGCCACUCAGAUCUC | 604 | 1407 | GAGAUCUGAGUGGCCAUGU | 923 |
| 1407 | CGUCAGCCAUGGAGUACCU | 605 | 1407 | CGUCAGCCAUGGAGUACCU | 605 | 1425 | AGGUACUCCAUGGCUGACG | 924 |
| 1425 | UAGAGAAGAAAAACUUCAU | 606 | 1425 | UAGAGAAGAAAAACUUCAU | 606 | 1443 | AUGAAGUUUUUCUUCUCUA | 925 |
| 1443 | UCCACAGAGAUCUUGCUGC | 607 | 1443 | UCCACAGAGAUCUUGCUGC | 607 | 1461 | GCAGCAAGAUCUCUGUGGA | 926 |
| 1461 | CCCGAAACUGCCUGGUAGG | 608 | 1461 | CCCGAAACUGCCUGGUAGG | 608 | 1479 | CCUACCAGGCAGUUUCGGG | 927 |
| 1479 | GGGAGAACCACUUGGUGAA | 609 | 1479 | GGGAGAACCACUUGGUGAA | 609 | 1497 | UUCACCAAGUGGUUCUCCC | 928 |
| 1497 | AGGUAGCUGAUUUUGGCCU | 610 | 1497 | AGGUAGCUGAUUUUGGCCU | 610 | 1515 | AGGCCAAAAUCAGCUACCU | 929 |
| 1515 | UGAGCAGGUUGAUGACAGG | 611 | 1515 | UGAGCAGGUUGAUGACAGG | 611 | 1533 | CCUGUCAUCAACCUGCUCA | 930 |
| 1533 | GGGACACCUACACAGCCCA | 612 | 1533 | GGGACACCUACACAGCCCA | 612 | 1551 | UGGGCUGUGUAGGUGUCCC | 931 |
| 1551 | AUGCUGGAGCCAAGUUCCC | 613 | 1551 | AUGCUGGAGCCAAGUUCCC | 613 | 1569 | GGGAACUUGGCUCCAGCAU | 932 |
| 1569 | CCAUCAAAUGGACUGCACC | 614 | 1569 | CCAUCAAAUGGACUGCACC | 614 | 1587 | GGUGCAGUCCAUUUGAUGG | 933 |
| 1587 | CCGAGAGCCUGGCCUACAA | 615 | 1587 | CCGAGAGCCUGGCCUACAA | 615 | 1605 | UUGUAGGCCAGGCUCUCGG | 934 |
| 1605 | ACAAGUUCUCCAUCAAGUC | 616 | 1605 | ACAAGUUCUCCAUCAAGUC | 616 | 1623 | GACUUGAUGGAGAACUUGU | 935 |
| 1623 | CCGACGUCUGGGCAUUUGG | 617 | 1623 | CCGACGUCUGGGCAUUUGG | 617 | 1641 | CCAAAUGCCCAGACGUCGG | 936 |
| 1641 | GAGUAUUGCUUUGGGAAAU | 618 | 1641 | GAGUAUUGCUUUGGGAAAU | 618 | 1659 | AUUUCCCAAAGCAAUACUC | 937 |
| 1659 | UUGCUACCUAUGGCAUGUC | 619 | 1659 | UUGCUACCUAUGGCAUGUC | 619 | 1677 | GACAUGCCAUAGGUAGCAA | 938 |
| 1677 | CCCCUUACCCGGGAAUUGA | 620 | 1677 | CCCCUUACCCGGGAAUUGA | 620 | 1695 | UCAAUUCCCGGGUAAGGGG | 939 |
| 1695 | ACCGUUCCCAGGUGUAUGA | 621 | 1695 | ACCGUUCCCAGGUGUAUGA | 621 | 1713 | UCAUACACCUGGGAACGGU | 940 |
| 1713 | AGCUGCUAGAGAAGGACUA | 622 | 1713 | AGCUGCUAGAGAAGGACUA | 622 | 1731 | UAGUCCUUCUCUAGCAGCU | 941 |
| 1731 | ACCGCAUGAAGCGCCCAGA | 623 | 1731 | ACCGCAUGAAGCGCCCAGA | 623 | 1749 | UCUGGGCGCUUCAUGCGGU | 942 |
| 1749 | AAGGCUGCCCAGAGAAGGU | 624 | 1749 | AAGGCUGCCCAGAGAAGGU | 624 | 1767 | ACCUUCUCUGGGCAGCCUU | 943 |
| 1767 | UCUAUGAACUCAUGCGAGC | 625 | 1767 | UCUAUGAACUCAUGCGAGC | 625 | 1785 | GCUCGCAUGAGUUCAUAGA | 944 |
| 1785 | CAUGUUGGCAGUGGAAUCC | 626 | 1785 | CAUGUUGGCAGUGGAAUCC | 626 | 1803 | GGAUUCCACUGCCAACAUG | 945 |
| 1803 | CCUCUGACCGGCCCUCCUU | 627 | 1803 | CCUCUGACCGGCCCUCCUU | 627 | 1821 | AAGGAGGGCCGGUCAGAGG | 946 |
| 1821 | UUGCUGAAAUCCACCAAGC | 628 | 1821 | UUGCUGAAAUCCACCAAGC | 628 | 1839 | GCUUGGUGGAUUUCAGCAA | 947 |
| 1839 | CCUUUGAAACAAUGUUCCA | 629 | 1839 | CCUUUGAAACAAUGUUCCA | 629 | 1857 | UGGAACAUUGUUUCAAAGG | 948 |
| 1857 | AGGAAUCCAGUAUCUCAGA | 630 | 1857 | AGGAAUCCAGUAUCUCAGA | 630 | 1875 | UCUGAGAUACUGGAUUCCU | 949 |
| 1875 | ACGAAGUGGAAAAGGAGCU | 631 | 1875 | ACGAAGUGGAAAAGGAGCU | 631 | 1893 | AGCUCCUUUUCCACUUCGU | 950 |
| 1893 | UGGGGAAACAAGGCGUCCG | 632 | 1893 | UGGGGAAACAAGGCGUCCG | 632 | 1911 | CGGACGCCUUGUUUCCCCA | 951 |
| 1911 | GUGGGGCUGUGACUACCUU | 633 | 1911 | GUGGGGCUGUGACUACCUU | 633 | 1929 | AAGGUAGUCACAGCCCCAC | 952 |
| 1929 | UGCUGCAGGCCCCAGAGCU | 634 | 1929 | UGCUGCAGGCCCCAGAGCU | 634 | 1947 | AGCUCUGGGGCCUGCAGCA | 953 |
| 1947 | UGCCCACCAAGACGAGGAC | 635 | 1947 | UGCCCACCAAGACGAGGAC | 635 | 1965 | GUCCUCGUCUUGGUGGGCA | 954 |
| 1965 | CCUCCAGGAGAGCUGCAGA | 636 | 1965 | CCUCCAGGAGAGCUGCAGA | 636 | 1983 | UCUGCAGCUCUCCUGGAGG | 955 |
| 1983 | AGCACAGAGACACCACUGA | 637 | 1983 | AGCACAGAGACACCACUGA | 637 | 2001 | UCAGUGGUGUCUCUGUGCU | 956 |
| 2001 | ACGUGCCUGAGAUGCCUCA | 638 | 2001 | ACGUGCCUGAGAUGCCUCA | 638 | 2019 | UGAGGCAUCUCAGGCACGU | 957 |
| 2019 | ACUCCAAGGGCCAGGGAGA | 639 | 2019 | ACUCCAAGGGCCAGGGAGA | 639 | 2037 | UCUCCCUGGCCCUUGGAGU | 958 |
| 2037 | AGAGCGAUCCUCUGGACCA | 640 | 2037 | AGAGCGAUCCUCUGGACCA | 640 | 2055 | UGGUCCAGAGGAUCGCUCU | 959 |
| 2055 | AUGAGCCUGCCGUGUCUCC | 641 | 2055 | AUGAGCCUGCCGUGUCUCC | 641 | 2073 | GGAGACACGGCAGGCUCAU | 960 |
| 2073 | CAUUGCUCCCUCGAAAAGA | 642 | 2073 | CAUUGCUCCCUCGAAAAGA | 642 | 2091 | UCUUUUCGAGGGAGCAAUG | 961 |
| 2091 | AGCGAGGUCCCCCGGAGGG | 643 | 2091 | AGCGAGGUCCCCCGGAGGG | 643 | 2109 | CCCUCCGGGGGACCUCGCU | 962 |
| 2109 | GCGGCCUGAAUGAAGAUGA | 644 | 2109 | GCGGCCUGAAUGAAGAUGA | 644 | 2127 | UCAUCUUCAUUCAGGCCGC | 963 |
| 2127 | AGCGCCUUCUCCCCAAAGA | 645 | 2127 | AGCGCCUUCUCCCCAAAGA | 645 | 2145 | UCUUUGGGGAGAAGGCGCU | 964 |
| 2145 | ACAAAAAGACCAACUUGUU | 646 | 2145 | ACAAAAAGACCAACUUGUU | 646 | 2163 | AACAAGUUGGUCUUUUUGU | 965 |
| 2163 | UCAGCGCCUUGAUCAAGAA | 647 | 2163 | UCAGCGCCUUGAUCAAGAA | 647 | 2181 | UUCUUGAUCAAGGCGCUGA | 966 |
| 2181 | AGAAGAAGAAGACAGCCCC | 648 | 2181 | AGAAGAAGAAGACAGCCCC | 648 | 2199 | GGGGCUGUCUUCUUCUUCU | 967 |
| 2199 | CAACCCCUCCCAAACGCAG | 649 | 2199 | CAACCCCUCCCAAACGCAG | 649 | 2217 | CUGCGUUUGGGAGGGGUUG | 968 |
| 2217 | GCAGCUCCUUCCGGGAGAU | 650 | 2217 | GCAGCUCCUUCCGGGAGAU | 650 | 2235 | AUCUCCCGGAAGGAGCUGC | 969 |
| 2235 | UGGACGGCCAGCCGGAGCG | 651 | 2235 | UGGACGGCCAGCCGGAGCG | 651 | 2253 | CGCUCCGGCUGGCCGUCCA | 970 |
| 2253 | GCAGAGGGGCCGGCGAGGA | 652 | 2253 | GCAGAGGGGCCGGCGAGGA | 652 | 2271 | UCCUCGCCGGCCCCUCUGC | 971 |
| 2271 | AAGAGGGCCGAGACAUCAG | 653 | 2271 | AAGAGGGCCGAGACAUCAG | 653 | 2289 | CUGAUGUCUCGGCCCUCUU | 972 |
| 2289 | GCAACGGGGCACUGGCUUU | 654 | 2289 | GCAACGGGGCACUGGCUUU | 654 | 2307 | AAAGCCAGUGCCCCGUUGC | 973 |
| 2307 | UCACCCCCUUGGACACAGC | 655 | 2307 | UCACCCCCUUGGACACAGC | 655 | 2325 | GCUGUGUCCAAGGGGGUGA | 974 |
| 2325 | CUGACCCAGCCAAGUCCCC | 656 | 2325 | CUGACCCAGCCAAGUCCCC | 656 | 2343 | GGGGACUUGGCUGGGUCAG | 975 |
| 2343 | CAAAGCCCAGCAAUGGGGC | 657 | 2343 | CAAAGCCCAGCAAUGGGGC | 657 | 2361 | GCCCCAUUGCUGGGCUUUG | 976 |
| 2361 | CUGGGGUCCCCAAUGGAGC | 658 | 2361 | CUGGGGUCCCCAAUGGAGC | 658 | 2379 | GCUCCAUUGGGGACCCCAG | 977 |
| 2379 | CCCUCCGGGAGUCCGGGGG | 659 | 2379 | CCCUCCGGGAGUCCGGGGG | 659 | 2397 | CCCCCGGACUCCCGGAGGG | 978 |
| 2397 | GCUCAGGCUUCCGGUCUCC | 660 | 2397 | GCUCAGGCUUCCGGUCUCC | 660 | 2415 | GGAGACCGGAAGCCUGAGC | 979 |
| 2415 | CCCACCUGUGGAAGAAGUC | 661 | 2415 | CCCACCUGUGGAAGAAGUC | 661 | 2433 | GACUUCUUCCACAGGUGGG | 980 |
| 2433 | CCAGCACGCUGACCAGCAG | 662 | 2433 | CCAGCACGCUGACCAGCAG | 662 | 2451 | CUGCUGGUCAGCGUGCUGG | 981 |
| 2451 | GCCGCCUAGCCACCGGCGA | 663 | 2451 | GCCGCCUAGCCACCGGCGA | 663 | 2469 | UCGCCGGUGGCUAGGCGGC | 982 |
| 2469 | AGGAGGAGGGCGGUGGCAG | 664 | 2469 | AGGAGGAGGGCGGUGGCAG | 664 | 2487 | CUGCCACCGCCCUCCUCCU | 983 |
| 2487 | GCUCCAGCAAGCGCUUCCU | 665 | 2487 | GCUCCAGCAAGCGCUUCCU | 665 | 2505 | AGGAAGCGCUUGCUGGAGC | 984 |
| 2505 | UGCGCUCUUGCUCCGUCUC | 666 | 2505 | UGCGCUCUUGCUCCGUCUC | 666 | 2523 | GAGACGGAGCAAGAGCGCA | 985 |
| 2523 | CCUGCGUUCCCCAUGGGGC | 667 | 2523 | CCUGCGUUCCCCAUGGGGC | 667 | 2541 | GCCCCAUGGGGAACGCAGG | 986 |
| 2541 | CCAAGGACACGGAGUGGAG | 668 | 2541 | CCAAGGACACGGAGUGGAG | 668 | 2559 | CUCCACUCCGUGUCCUUGG | 987 |
| 2559 | GGUCAGUCACGCUGCCUCG | 669 | 2559 | GGUCAGUCACGCUGCCUCG | 669 | 2577 | CGAGGCAGCGUGACUGACC | 988 |
| 2577 | GGGACUUGCAGUCCACGGG | 670 | 2577 | GGGACUUGCAGUCCACGGG | 670 | 2595 | CCCGUGGACUGCAAGUCCC | 989 |
| 2595 | GAAGACAGUUUGACUCGUC | 671 | 2595 | GAAGACAGUUUGACUCGUC | 671 | 2613 | GACGAGUCAAACUGUCUUC | 990 |
| 2613 | CCACAUUUGGAGGGCACAA | 672 | 2613 | CCACAUUUGGAGGGCACAA | 672 | 2631 | UUGUGCCCUCCAAAUGUGG | 991 |
| 2631 | AAAGUGAGAAGCCGGCUCU | 673 | 2631 | AAAGUGAGAAGCCGGCUCU | 673 | 2649 | AGAGCCGGCUUCUCACUUU | 992 |
| 2649 | UGCCUCGGAAGAGGGCAGG | 674 | 2649 | UGCCUCGGAAGAGGGCAGG | 674 | 2667 | CCUGCCCUCUUCCGAGGCA | 993 |
| 2667 | GGGAGAACAGGUCUGACCA | 675 | 2667 | GGGAGAACAGGUCUGACCA | 675 | 2685 | UGGUCAGACCUGUUCUCCC | 994 |
| 2685 | AGGUGACCCGAGGCACAGU | 676 | 2685 | AGGUGACCCGAGGCACAGU | 676 | 2703 | ACUGUGCCUCGGGUCACCU | 995 |
| 2703 | UAACGCCUCCCCCCAGGCU | 677 | 2703 | UAACGCCUCCCCCCAGGCU | 677 | 2721 | AGCCUGGGGGGAGGCGUUA | 996 |
| 2721 | UGGUGAAAAAGAAUGAGGA | 678 | 2721 | UGGUGAAAAAGAAUGAGGA | 678 | 2739 | UCCUCAUUCUUUUUCACCA | 997 |
| 2739 | AAGCUGCUGAUGAGGUCUU | 679 | 2739 | AAGCUGCUGAUGAGGUCUU | 679 | 2757 | AAGACCUCAUCAGCAGCUU | 998 |
| 2757 | UCAAAGACAUCAUGGAGUC | 680 | 2757 | UCAAAGACAUCAUGGAGUC | 680 | 2775 | GACUCCAUGAUGUCUUUGA | 999 |
| 2775 | CCAGCCCGGGCUCCAGCCC | 681 | 2775 | CCAGCCCGGGCUCCAGCCC | 681 | 2793 | GGGCUGGAGCCCGGGCUGG | 1000 |
| 2793 | CGCCCAACCUGACUCCAAA | 682 | 2793 | CGCCCAACCUGACUCCAAA | 682 | 2811 | UUUGGAGUCAGGUUGGGCG | 1001 |
| 2811 | AACCCCUCCGGCGGCAGGU | 683 | 2811 | AACCCCUCCGGCGGCAGGU | 683 | 2829 | ACCUGCCGCCGGAGGGGUU | 1002 |
| 2829 | UCACCGUGGCCCCUGCCUC | 684 | 2829 | UCACCGUGGCCCCUGCCUC | 684 | 2847 | GAGGCAGGGGCCACGGUGA | 1003 |
| 2847 | CGGGCCUCCCCCACAAGGA | 685 | 2847 | CGGGCCUCCCCCACAAGGA | 685 | 2865 | UCCUUGUGGGGGAGGCCCG | 1004 |
| 2865 | AAGAAGCCUGGAAAGGCAG | 686 | 2865 | AAGAAGCCUGGAAAGGCAG | 686 | 2883 | CUGCCUUUCCAGGCUUCUU | 1005 |
| 2883 | GUGCCUUAGGGACCCCUGC | 687 | 2883 | GUGCCUUAGGGACCCCUGC | 687 | 2901 | GCAGGGGUCCCUAAGGCAC | 1006 |
| 2901 | CUGCAGCUGAGCCAGUGAC | 688 | 2901 | CUGCAGCUGAGCCAGUGAC | 688 | 2919 | GUCACUGGCUCAGCUGCAG | 1007 |
| 2919 | CCCCCACCAGCAAAGCAGG | 689 | 2919 | CCCCCACCAGCAAAGCAGG | 689 | 2937 | CCUGCUUUGCUGGUGGGGG | 1008 |
| 2937 | GCUCAGGUGCACCAAGGGG | 690 | 2937 | GCUCAGGUGCACCAAGGGG | 690 | 2955 | CCCCUUGGUGCACCUGAGC | 1009 |
| 2955 | GCACCAGCAAGGGCCCCGC | 691 | 2955 | GCACCAGCAAGGGCCCCGC | 691 | 2973 | GCGGGGCCCUUGCUGGUGC | 1010 |
| 2973 | CCGAGGAGUCCAGAGUGAG | 692 | 2973 | CCGAGGAGUCCAGAGUGAG | 692 | 2991 | CUCACUCUGGACUCCUCGG | 1011 |
| 2991 | GGAGGCACAAGCACUCCUC | 693 | 2991 | GGAGGCACAAGCACUCCUC | 693 | 3009 | GAGGAGUGCUUGUGCCUCC | 1012 |
| 3009 | CUGAGUCGCCAGGGAGGGA | 694 | 3009 | CUGAGUCGCCAGGGAGGGA | 694 | 3027 | UCCCUCCCUGGCGACUCAG | 1013 |
| 3027 | ACAAGGGGAAAUUGUCCAA | 695 | 3027 | ACAAGGGGAAAUUGUCCAA | 695 | 3045 | UUGGACAAUUUCCCCUUGU | 1014 |
| 3045 | AGCUCAAACCUGCCCCGCC | 696 | 3045 | AGCUCAAACCUGCCCCGCC | 696 | 3063 | GGCGGGGCAGGUUUGAGCU | 1015 |
| 3063 | CGCCCCCACCAGCAGCCUC | 697 | 3063 | CGCCCCCACCAGCAGCCUC | 697 | 3081 | GAGGCUGCUGGUGGGGGCG | 1016 |
| 3081 | CUGCAGGGAAGGCUGGAGG | 698 | 3081 | CUGCAGGGAAGGCUGGAGG | 698 | 3099 | CCUCCAGCCUUCCCUGCAG | 1017 |
| 3099 | GAAAGCCCUCGCAGAGGCC | 699 | 3099 | GAAAGCCCUCGCAGAGGCC | 699 | 3117 | GGCCUCUGCGAGGGCUUUC | 1018 |
| 3117 | CCGGCCAGGAGGCUGCCGG | 700 | 3117 | CCGGCCAGGAGGCUGCCGG | 700 | 3135 | CCGGCAGCCUCCUGGCCGG | 1019 |
| 3135 | GGGAGGCAGUCUUGGGCGC | 701 | 3135 | GGGAGGCAGUCUUGGGCGC | 701 | 3153 | GCGCCCAAGACUGCCUCCC | 1020 |
| 3153 | CAAAGACAAAAGCCACGAG | 702 | 3153 | CAAAGACAAAAGCCACGAG | 702 | 3171 | CUCGUGGCUUUUGUCUUUG | 1021 |
| 3171 | GUCUGGUUGAUGCUGUGAA | 703 | 3171 | GUCUGGUUGAUGCUGUGAA | 703 | 3189 | UUCACAGCAUCAACCAGAC | 1022 |
| 3189 | ACAGUGACGCUGCCAAGCC | 704 | 3189 | ACAGUGACGCUGCCAAGCC | 704 | 3207 | GGCUUGGCAGCGUCACUGU | 1023 |
| 3207 | CCAGCCAGCCGGCAGAGGG | 705 | 3207 | CCAGCCAGCCGGCAGAGGG | 705 | 3225 | CCCUCUGCCGGCUGGCUGG | 1024 |
| 3225 | GCCUCAAAAAGCCCGUGCU | 706 | 3225 | GCCUCAAAAAGCCCGUGCU | 706 | 3243 | AGCACGGGCUUUUUGAGGC | 1025 |
| 3243 | UCCCGGCCACUCCAAAGCC | 707 | 3243 | UCCCGGCCACUCCAAAGCC | 707 | 3261 | GGCUUUGGAGUGGCCGGGA | 1026 |
| 3261 | CACACCCCGCCAAGCCGUC | 708 | 3261 | CACACCCCGCCAAGCCGUC | 708 | 3279 | GACGGCUUGGCGGGGUGUG | 1027 |
| 3279 | CGGGGACCCCCAUCAGCCC | 709 | 3279 | CGGGGACCCCCAUCAGCCC | 709 | 3297 | GGGCUGAUGGGGGUCCCCG | 1028 |
| 3297 | CAGCCCCCGUUCCCCUUUC | 710 | 3297 | CAGCCCCCGUUCCCCUUUC | 710 | 3315 | GAAAGGGGAACGGGGGCUG | 1029 |
| 3315 | CCACGUUGCCAUCAGCAUC | 711 | 3315 | CCACGUUGCCAUCAGCAUC | 711 | 3333 | GAUGCUGAUGGCAACGUGG | 1030 |
| 3333 | CCUCGGCCUUGGCAGGGGA | 712 | 3333 | CCUCGGCCUUGGCAGGGGA | 712 | 3351 | UCCCCUGCCAAGGCCGAGG | 1031 |
| 3351 | ACCAGCCGUCUUCCACUGC | 713 | 3351 | ACCAGCCGUCUUCCACUGC | 713 | 3369 | GCAGUGGAAGACGGCUGGU | 1032 |
| 3369 | CCUUCAUCCCUCUCAUAUC | 714 | 3369 | CCUUCAUCCCUCUCAUAUC | 714 | 3387 | GAUAUGAGAGGGAUGAAGG | 1033 |
| 3387 | CAACCCGAGUGUCUCUUCG | 715 | 3387 | CAACCCGAGUGUCUCUUCG | 715 | 3405 | CGAAGAGACACUCGGGUUG | 1034 |
| 3405 | GGAAAACCCGCCAGCCUCC | 716 | 3405 | GGAAAACCCGCCAGCCUCC | 716 | 3423 | GGAGGCUGGCGGGUUUUCC | 1035 |
| 3423 | CAGAGCGGGCCAGCGGCGC | 717 | 3423 | CAGAGCGGGCCAGCGGCGC | 717 | 3441 | GCGCCGCUGGCCCGCUCUG | 1036 |
| 3441 | CCAUCACCAAGGGCGUGGU | 718 | 3441 | CCAUCACCAAGGGCGUGGU | 718 | 3459 | ACCACGCCCUUGGUGAUGG | 1037 |
| 3459 | UCUUGGACAGCACCGAGGC | 719 | 3459 | UCUUGGACAGCACCGAGGC | 719 | 3477 | GCCUCGGUGCUGUCCAAGA | 1038 |
| 3477 | CGCUGUGCCUCGCCAUCUC | 720 | 3477 | CGCUGUGCCUCGCCAUCUC | 720 | 3495 | GAGAUGGCGAGGCACAGCG | 1039 |
| 3495 | CUGGGAACUCCGAGCAGAU | 721 | 3495 | CUGGGAACUCCGAGCAGAU | 721 | 3513 | AUCUGCUCGGAGUUCCCAG | 1040 |
| 3513 | UGGCCAGCCACAGCGCAGU | 722 | 3513 | UGGCCAGCCACAGCGCAGU | 722 | 3531 | ACUGCGCUGUGGCUGGCCA | 1041 |
| 3531 | UGCUGGAGGCCGGCAAAAA | 723 | 3531 | UGCUGGAGGCCGGCAAAAA | 723 | 3549 | UUUUUGCCGGCCUCCAGCA | 1042 |
| 3549 | ACCUCUACACGUUCUGCGU | 724 | 3549 | ACCUCUACACGUUCUGCGU | 724 | 3567 | ACGCAGAACGUGUAGAGGU | 1043 |
| 3567 | UGAGCUAUGUGGAUUCCAU | 725 | 3567 | UGAGCUAUGUGGAUUCCAU | 725 | 3585 | AUGGAAUCCACAUAGCUCA | 1044 |
| 3585 | UCCAGCAAAUGAGGAACAA | 726 | 3585 | UCCAGCAAAUGAGGAACAA | 726 | 3603 | UUGUUCCUCAUUUGCUGGA | 1045 |
| 3603 | AGUUUGCCUUCCGAGAGGC | 727 | 3603 | AGUUUGCCUUCCGAGAGGC | 727 | 3621 | GCCUCUCGGAAGGCAAACU | 1046 |
| 3621 | CCAUCAACAAACUGGAGAA | 728 | 3621 | CCAUCAACAAACUGGAGAA | 728 | 3639 | UUCUCCAGUUUGUUGAUGG | 1047 |
| 3639 | AUAAUCUCCGGGAGCUUCA | 729 | 3639 | AUAAUCUCCGGGAGCUUCA | 729 | 3657 | UGAAGCUCCCGGAGAUUAU | 1048 |
| 3657 | AGAUCUGCCCGGCGUCAGC | 730 | 3657 | AGAUCUGCCCGGCGUCAGC | 730 | 3675 | GCUGACGCCGGGCAGAUCU | 1049 |
| 3675 | CAGGCAGUGGUCCGGCGGC | 731 | 3675 | CAGGCAGUGGUCCGGCGGC | 731 | 3693 | GCCGCCGGACCACUGCCUG | 1050 |
| 3693 | CCACUCAGGACUUCAGCAA | 732 | 3693 | CCACUCAGGACUUCAGCAA | 732 | 3711 | UUGCUGAAGUCCUGAGUGG | 1051 |
| 3711 | AGCUCCUCAGUUCGGUGAA | 733 | 3711 | AGCUCCUCAGUUCGGUGAA | 733 | 3729 | UUCACCGAACUGAGGAGCU | 1052 |
| 3729 | AGGAAAUCAGUGACAUAGU | 734 | 3729 | AGGAAAUCAGUGACAUAGU | 734 | 3747 | ACUAUGUCACUGAUUUCCU | 1053 |
| 3747 | UGCAGAGGUAGCAGCAGUC | 735 | 3747 | UGCAGAGGUAGCAGCAGUC | 735 | 3765 | GACUGCUGCUACCUCUGCA | 1054 |
| 3765 | CAGGGGUCAGGUGUCAGGC | 736 | 3765 | CAGGGGUCAGGUGUCAGGC | 736 | 3783 | GCCUGACACCUGACCCCUG | 1055 |
| 3783 | CCCGUCGGAGCUGCCUGCA | 737 | 3783 | CCCGUCGGAGCUGCCUGCA | 737 | 3801 | UGCAGGCAGCUCCGACGGG | 1056 |
| 3801 | AGCACAUGCGGGCUCGCCC | 738 | 3801 | AGCACAUGCGGGCUCGCCC | 738 | 3819 | GGGCGAGCCCGCAUGUGCU | 1057 |
| 3819 | CAUACCCAUGACAGUGGCU | 739 | 3819 | CAUACCCAUGACAGUGGCU | 739 | 3837 | AGCCACUGUCAUGGGUAUG | 1058 |
| 3837 | UGAGAAGGGACUAGUGAGU | 740 | 3837 | UGAGAAGGGACUAGUGAGU | 740 | 3855 | ACUCACUAGUCCCUUCUCA | 1059 |
| 3855 | UCAGCACCUUGGCCCAGGA | 741 | 3855 | UCAGCACCUUGGCCCAGGA | 741 | 3873 | UCCUGGGCCAAGGUGCUGA | 1060 |
| 3873 | AGCUCUGCGCCAGGCAGAG | 742 | 3873 | AGCUCUGCGCCAGGCAGAG | 742 | 3891 | CUCUGCCUGGCGCAGAGCU | 1061 |
| 3891 | GCUGAGGGCCCUGUGGAGU | 743 | 3891 | GCUGAGGGCCCUGUGGAGU | 743 | 3909 | ACUCCACAGGGCCCUCAGC | 1062 |
| 3909 | UCCAGCUCUACUACCUACG | 744 | 3909 | UCCAGCUCUACUACCUACG | 744 | 3927 | CGUAGGUAGUAGAGCUGGA | 1063 |
| 3927 | GUUUGCACCGCCUGCCCUC | 745 | 3927 | GUUUGCACCGCCUGCCCUC | 745 | 3945 | GAGGGCAGGCGGUGCAAAC | 1064 |
| 3945 | CCCGCACCUUCCUCCUCCC | 746 | 3945 | CCCGCACCUUCCUCCUCCC | 746 | 3963 | GGGAGGAGGAAGGUGCGGG | 1065 |
| 3963 | CCGCUCCGUCUCUGUCCUC | 747 | 3963 | CCGCUCCGUCUCUGUCCUC | 747 | 3981 | GAGGACAGAGACGGAGCGG | 1066 |
| 3981 | CGAAUUUUAUCUGUGGAGU | 748 | 3981 | CGAAUUUUAUCUGUGGAGU | 748 | 3999 | ACUCCACAGAUAAAAUUCG | 1067 |
| 3999 | UUCCUGCUCCGUGGACUGC | 749 | 3999 | UUCCUGCUCCGUGGACUGC | 749 | 4017 | GCAGUCCACGGAGCAGGAA | 1068 |
| 4017 | CAGUCGGCAUGCCAGGACC | 750 | 4017 | CAGUCGGCAUGCCAGGACC | 750 | 4035 | GGUCCUGGCAUGCCGACUG | 1069 |
| 4035 | CCGCCAGCCCCGCUCCCAC | 751 | 4035 | CCGCCAGCCCCGCUCCCAC | 751 | 4053 | GUGGGAGCGGGGCUGGCGG | 1070 |
| 4053 | CCUAGUGCCCCAGACUGAG | 752 | 4053 | CCUAGUGCCCCAGACUGAG | 752 | 4071 | CUCAGUCUGGGGCACUAGG | 1071 |
| 4071 | GCUCUCCAGGCCAGGUGGG | 753 | 4071 | GCUCUCCAGGCCAGGUGGG | 753 | 4089 | CCCACCUGGCCUGGAGAGC | 1072 |
| 4089 | GAACGGCUGAUGUGGACUG | 754 | 4089 | GAACGGCUGAUGUGGACUG | 754 | 4107 | CAGUCCACAUCAGCCGUUC | 1073 |
| 4107 | GUCUUUUUCAUUUUUUUCU | 755 | 4107 | GUCUUUUUCAUUUUUUUCU | 755 | 4125 | AGAAAAAAAUGAAAAAGAC | 1074 |
| 4125 | UCUCUGGAGCCCCUCCUCC | 756 | 4125 | UCUCUGGAGCCCCUCCUCC | 756 | 4143 | GGAGGAGGGGCUCCAGAGA | 1075 |
| 4143 | CCCCGGCUGGGCCUCCUUC | 757 | 4143 | CCCCGGCUGGGCCUCCUUC | 757 | 4161 | GAAGGAGGCCCAGCCGGGG | 1076 |
| 4161 | CUUCCACUUCUCCAAGAAU | 758 | 4161 | CUUCCACUUCUCCAAGAAU | 758 | 4179 | AUUCUUGGAGAAGUGGAAG | 1077 |
| 4179 | UGGAAGCCUGAACUGAGGC | 759 | 4179 | UGGAAGCCUGAACUGAGGC | 759 | 4197 | GCCUCAGUUCAGGCUUCCA | 1078 |
| 4197 | CCUUGUGUGUCAGGCCCUC | 760 | 4197 | CCUUGUGUGUCAGGCCCUC | 760 | 4215 | GAGGGCCUGACACACAAGG | 1079 |
| 4215 | CUGCCUGCACUCCCUGGCC | 761 | 4215 | CUGCCUGCACUCCCUGGCC | 761 | 4233 | GGCCAGGGAGUGCAGGCAG | 1080 |
| 4233 | CUUGCCCGUCGUGUGCUGA | 762 | 4233 | CUUGCCCGUCGUGUGCUGA | 762 | 4251 | UCAGCACACGACGGGCAAG | 1081 |
| 4251 | AAGACAUGUUUCAAGAACC | 763 | 4251 | AAGACAUGUUUCAAGAACC | 763 | 4269 | GGUUCUUGAAACAUGUCUU | 1082 |
| 4269 | CGCCAUUUCGGGAAGGGCA | 764 | 4269 | CGCCAUUUCGGGAAGGGCA | 764 | 4287 | UGCCCUUCCCGAAAUGGCG | 1083 |
| 4287 | AUGCACGGGCCAUGCACAC | 765 | 4287 | AUGCACGGGCCAUGCACAC | 765 | 4305 | GUGUGCAUGGCCCGUGCAU | 1084 |
| 4305 | CGGCUGGUCACUCUGCCCU | 766 | 4305 | CGGCUGGUCACUCUGCCCU | 766 | 4323 | AGGGCAGAGUGACCAGCCG | 1085 |
| 4323 | UCUGCUGCUGCCCGGGGUG | 767 | 4323 | UCUGCUGCUGCCCGGGGUG | 767 | 4341 | CACCCCGGGCAGCAGCAGA | 1086 |
| 4341 | GGGGUGCACUCGCCAUUUC | 768 | 4341 | GGGGUGCACUCGCCAUUUC | 768 | 4359 | GAAAUGGCGAGUGCACCCC | 1087 |
| 4359 | CCUCACGUGCAGGACAGCU | 769 | 4359 | CCUCACGUGCAGGACAGCU | 769 | 4377 | AGCUGUCCUGCACGUGAGG | 1088 |
| 4377 | UCUUGAUUUGGGUGGAAAA | 770 | 4377 | UCUUGAUUUGGGUGGAAAA | 770 | 4395 | UUUUCCACCCAAAUCAAGA | 1089 |
| 4395 | ACAGGGUGCUAAAGCCAAC | 771 | 4395 | ACAGGGUGCUAAAGCCAAC | 771 | 4413 | GUUGGCUUUAGCACCCUGU | 1090 |
| 4413 | CCAGCCUUUGGGUCCUGGG | 772 | 4413 | CCAGCCUUUGGGUCCUGGG | 772 | 4431 | CCCAGGACCCAAAGGCUGG | 1091 |
| 4431 | GCAGGUGGGAGCUGAAAAG | 773 | 4431 | GCAGGUGGGAGCUGAAAAG | 773 | 4449 | CUUUUCAGCUCCCACCUGC | 1092 |
| 4449 | GGAUCGAGGCAUGGGGCAU | 774 | 4449 | GGAUCGAGGCAUGGGGCAU | 774 | 4467 | AUGCCCCAUGCCUCGAUCC | 1093 |
| 4467 | UGUCCUUUCCAUCUGUCCA | 775 | 4467 | UGUCCUUUCCAUCUGUCCA | 775 | 4485 | UGGACAGAUGGAAAGGACA | 1094 |
| 4485 | ACAUCCCCAGAGCCCAGCU | 776 | 4485 | ACAUCCCCAGAGCCCAGCU | 776 | 4503 | AGCUGGGCUCUGGGGAUGU | 1095 |
| 4503 | UCUUGCUCUCUUGUGACGU | 777 | 4503 | UCUUGCUCUCUUGUGACGU | 777 | 4521 | ACGUCACAAGAGAGCAAGA | 1096 |
| 4521 | UGCACUGUGAAUCCUGGCA | 778 | 4521 | UGCACUGUGAAUCCUGGCA | 778 | 4539 | UGCCAGGAUUCACAGUGCA | 1097 |
| 4539 | AAGAAAGCUUGAGUCUCAA | 779 | 4539 | AAGAAAGCUUGAGUCUCAA | 779 | 4557 | UUGAGACUCAAGCUUUCUU | 1098 |
| 4557 | AGGGUGGCAGGUCACUGUC | 780 | 4557 | AGGGUGGCAGGUCACUGUC | 780 | 4575 | GACAGUGACCUGCCACCCU | 1099 |
| 4575 | CACUGCCGACAUCCCUCCC | 781 | 4575 | CACUGCCGACAUCCCUCCC | 781 | 4593 | GGGAGGGAUGUCGGCAGUG | 1100 |
| 4593 | CCCAGCAGAAUGGAGGCAG | 782 | 4593 | CCCAGCAGAAUGGAGGCAG | 782 | 4611 | CUGCCUCCAUUCUGCUGGG | 1101 |
| 4611 | GGGGACAAGGGAGGCAGUG | 783 | 4611 | GGGGACAAGGGAGGCAGUG | 783 | 4629 | CACUGCCUCCCUUGUCCCC | 1102 |
| 4629 | GGCUAGUGGGGUGAACAGC | 784 | 4629 | GGCUAGUGGGGUGAACAGC | 784 | 4647 | GCUGUUCACCCCACUAGCC | 1103 |
| 4647 | CUGGUGCCAAAUAGCCCCA | 785 | 4647 | CUGGUGCCAAAUAGCCCCA | 785 | 4665 | UGGGGCUAUUUGGCACCAG | 1104 |
| 4665 | AGACUGGGCCCAGGCAGGU | 786 | 4665 | AGACUGGGCCCAGGCAGGU | 786 | 4683 | ACCUGCCUGGGCCCAGUCU | 1105 |
| 4683 | UCUGCAAGGGCCCAGAGUG | 787 | 4683 | UCUGCAAGGGCCCAGAGUG | 787 | 4701 | CACUCUGGGCCCUUGCAGA | 1106 |
| 4701 | GAACCGUCCUUUCACACAU | 788 | 4701 | GAACCGUCCUUUCACACAU | 788 | 4719 | AUGUGUGAAAGGACGGUUC | 1107 |
| 4719 | UCUGGGUGCCCUGAAGGGC | 789 | 4719 | UCUGGGUGCCCUGAAGGGC | 789 | 4737 | GCCCUUCAGGGCACCCAGA | 1108 |
| 4737 | CCCUUCCCCUCCCCCACUC | 790 | 4737 | CCCUUCCCCUCCCCCACUC | 790 | 4755 | GAGUGGGGGAGGGGAAGGG | 1109 |
| 4755 | CCUCUAAGACAAAGUAGAU | 791 | 4755 | CCUCUAAGACAAAGUAGAU | 791 | 4773 | AUCUACUUUGUCUUAGAGG | 1110 |
| 4773 | UUCUUACAAGGCCCUUUCC | 792 | 4773 | UUCUUACAAGGCCCUUUCC | 792 | 4791 | GGAAAGGGCCUUGUAAGAA | 1111 |
| 4791 | CUUUGGAACAAGACAGCCU | 793 | 4791 | CUUUGGAACAAGACAGCCU | 793 | 4809 | AGGCUGUCUUGUUCCAAAG | 1112 |
| 4809 | UUCACUUUUCUGAGUUCUU | 794 | 4809 | UUCACUUUUCUGAGUUCUU | 794 | 4827 | AAGAACUCAGAAAAGUGAA | 1113 |
| 4827 | UGAAGCAUUUCAAAGCCCU | 795 | 4827 | UGAAGCAUUUCAAAGCCCU | 795 | 4845 | AGGGCUUUGAAAUGCUUCA | 1114 |
| 4845 | UGCCUCUGUGUAGCCGCCC | 796 | 4845 | UGCCUCUGUGUAGCCGCCC | 796 | 4863 | GGGCGGCUACACAGAGGCA | 1115 |
| 4863 | CUGAGAGAGAAUAGAGCUG | 797 | 4863 | CUGAGAGAGAAUAGAGCUG | 797 | 4881 | CAGCUCUAUUCUCUCUCAG | 1116 |
| 4881 | GCCACUGGGCACCUCGCGA | 798 | 4881 | GCCACUGGGCACCUCGCGA | 798 | 4899 | UCGCGAGGUGCCCAGUGGC | 1117 |
| 4899 | ACAGGUGGGAGGAAAGGGC | 799 | 4899 | ACAGGUGGGAGGAAAGGGC | 799 | 4917 | GCCCUUUCCUCCCACCUGU | 1118 |
| 4917 | CCUGCGCAGUCCUGGUCCU | 800 | 4917 | CCUGCGCAGUCCUGGUCCU | 800 | 4935 | AGGACCAGGACUGCGCAGG | 1119 |
| 4935 | UGGCUGCACUCUUGAACUG | 801 | 4935 | UGGCUGCACUCUUGAACUG | 801 | 4953 | CAGUUCAAGAGUGCAGCCA | 1120 |
| 4953 | GGGCGAAUGUCUUAUUUAA | 802 | 4953 | GGGCGAAUGUCUUAUUUAA | 802 | 4971 | UUAAAUAAGACAUUCGCCC | 1121 |
| 4971 | AUUACCGUGAGUGACAUAG | 803 | 4971 | AUUACCGUGAGUGACAUAG | 803 | 4989 | CUAUGUCACUCACGGUAAU | 1122 |
| 4989 | GCCUCAUGUUCUGUGGGGG | 804 | 4989 | GCCUCAUGUUCUGUGGGGG | 804 | 5007 | CCCCCACAGAACAUGAGGC | 1123 |
| 5007 | GUCAUCAGGGAGGGUUAGG | 805 | 5007 | GUCAUCAGGGAGGGUUAGG | 805 | 5025 | CCUAACCCUCCCUGAUGAC | 1124 |
| 5025 | GAAAACCACAAACGGAGCC | 806 | 5025 | GAAAACCACAAACGGAGCC | 806 | 5043 | GGCUCCGUUUGUGGUUUUC | 1125 |
| 5043 | CCCUGAAAGCCUCACGUAU | 807 | 5043 | CCCUGAAAGCCUCACGUAU | 807 | 5061 | AUACGUGAGGCUUUCAGGG | 1126 |
| 5061 | UUUCACAGAGCACGCCUGC | 808 | 5061 | UUUCACAGAGCACGCCUGC | 808 | 5079 | GCAGGCGUGCUCUGUGAAA | 1127 |
| 5079 | CCAUCUUCUCCCCGAGGCU | 809 | 5079 | CCAUCUUCUCCCCGAGGCU | 809 | 5097 | AGCCUCGGGGAGAAGAUGG | 1128 |
| 5097 | UGCCCCAGGCCGGAGCCCA | 810 | 5097 | UGCCCCAGGCCGGAGCCCA | 810 | 5115 | UGGGCUCCGGCCUGGGGCA | 1129 |
| 5115 | AGAUACCGGCGGGCUGUGA | 811 | 5115 | AGAUACCGGCGGGCUGUGA | 811 | 5133 | UCACAGCCCGCCGGUAUCU | 1130 |
| 5133 | ACUCUGGGCAGGGACCCGG | 812 | 5133 | ACUCUGGGCAGGGACCCGG | 812 | 5151 | CCGGGUCCCUGCCCAGAGU | 1131 |
| 5151 | GGGUCUCCUGGACCUUGAC | 813 | 5151 | GGGUCUCCUGGACCUUGAC | 813 | 5169 | GUCAAGGUCCAGGAGACCC | 1132 |
| 5169 | CAGAGCAGCUAACUCCGAG | 814 | 5169 | CAGAGCAGCUAACUCCGAG | 814 | 5187 | CUCGGAGUUAGCUGCUCUG | 1133 |
| 5187 | GAGCAGUGGGCAGGUGGCC | 815 | 5187 | GAGCAGUGGGCAGGUGGCC | 815 | 5205 | GGCCACCUGCCCACUGCUC | 1134 |
| 5205 | CGCCCCUGAGGCUUCACGC | 816 | 5205 | CGCCCCUGAGGCUUCACGC | 816 | 5223 | GCGUGAAGCCUCAGGGGCG | 1135 |
| 5223 | CCGGAGAAGCCACCUUCCC | 817 | 5223 | CCGGAGAAGCCACCUUCCC | 817 | 5241 | GGGAAGGUGGCUUCUCCGG | 1136 |
| 5241 | CGCCCCUUCAUACCGCCUC | 818 | 5241 | CGCCCCUUCAUACCGCCUC | 818 | 5259 | GAGGCGGUAUGAAGGGGCG | 1137 |
| 5259 | CGUGCCAGCAGCCUCGCAC | 819 | 5259 | CGUGCCAGCAGCCUCGCAC | 819 | 5277 | GUGCGAGGCUGCUGGCACG | 1138 |
| 5277 | CAGGCCCUAGCUUUACGCU | 820 | 5277 | CAGGCCCUAGCUUUACGCU | 820 | 5295 | AGCGUAAAGCUAGGGCCUG | 1139 |
| 5295 | UCAUCACCUAAACUUGUAC | 821 | 5295 | UCAUCACCUAAACUUGUAC | 821 | 5313 | GUACAAGUUUAGGUGAUGA | 1140 |
| 5313 | CUUUAUUUUUCUGAUAGAA | 822 | 5313 | CUUUAUUUUUCUGAUAGAA | 822 | 5331 | UUCUAUCAGAAAAAUAAAG | 1141 |
| 5331 | AAUGGUUUCCUCUGGAUCG | 823 | 5331 | AAUGGUUUCCUCUGGAUCG | 823 | 5349 | CGAUCCAGAGGAAACCAUU | 1142 |
| 5349 | GUUUUAUGCGGUUCUUACA | 824 | 5349 | GUUUUAUGCGGUUCUUACA | 824 | 5367 | UGUAAGAACCGCAUAAAAC | 1143 |
| 5367 | AGCACAUCACCUCUUUCCC | 825 | 5367 | AGCACAUCACCUCUUUCCC | 825 | 5385 | GGGAAAGAGGUGAUGUGCU | 1144 |
| 5385 | CCCCGACGGCUGUGACGCA | 826 | 5385 | CCCCGACGGCUGUGACGCA | 826 | 5403 | UGCGUCACAGCCGUCGGGG | 1145 |
| 5403 | AGCGGAGAGGCACUAGUCA | 827 | 5403 | AGCGGAGAGGCACUAGUCA | 827 | 5421 | UGACUAGUGCCUCUCCGCU | 1146 |
| 5421 | ACCGACAGCGGCCUUGAAG | 828 | 5421 | ACCGACAGCGGCCUUGAAG | 828 | 5439 | CUUCAAGGCCGCUGUCGGU | 1147 |
| 5439 | GACAGAGCAAAGCCCCCAC | 829 | 5439 | GACAGAGCAAAGCCCCCAC | 829 | 5457 | GUGGGGGCUUUGCUCUGUC | 1148 |
| 5457 | CCCAGGUCCCCCGACUGCC | 830 | 5457 | CCCAGGUCCCCCGACUGCC | 830 | 5475 | GGCAGUCGGGGGACCUGGG | 1149 |
| 5475 | CUGUCUCCAUGAGGUACUG | 831 | 5475 | CUGUCUCCAUGAGGUACUG | 831 | 5493 | CAGUACCUCAUGGAGACAG | 1150 |
| 5493 | GGUCCCUUCCUUUUGUUAA | 832 | 5493 | GGUCCCUUCCUUUUGUUAA | 832 | 5511 | UUAACAAAAGGAAGGGACC | 1151 |
| 5511 | ACGUGAUGUGCCACUAUAU | 833 | 5511 | ACGUGAUGUGCCACUAUAU | 833 | 5529 | AUAUAGUGGCACAUCACGU | 1152 |
| 5529 | UUUUACACGUAUCUCUUGG | 834 | 5529 | UUUUACACGUAUCUCUUGG | 834 | 5547 | CCAAGAGAUACGUGUAAAA | 1153 |
| 5547 | GUAUGCAUCUUUUAUAGAC | 835 | 5547 | GUAUGCAUCUUUUAUAGAC | 835 | 5565 | GUCUAUAAAAGAUGCAUAC | 1154 |
| 5565 | CGCUCUUUUCUAAGUGGCG | 836 | 5565 | CGCUCUUUUCUAAGUGGCG | 836 | 5583 | CGCCACUUAGAAAAGAGCG | 1155 |
| 5583 | GUGUGCAUAGCGUCCUGCC | 837 | 5583 | GUGUGCAUAGCGUCCUGCC | 837 | 5601 | GGCAGGACGCUAUGCACAC | 1156 |
| 5601 | CCUGCCCUCGGGGGCCUGU | 838 | 5601 | CCUGCCCUCGGGGGCCUGU | 838 | 5619 | ACAGGCCCCCGAGGGCAGG | 1157 |
| 5619 | UGGUGGCUCCCCCUCUGCU | 839 | 5619 | UGGUGGCUCCCCCUCUGCU | 839 | 5637 | AGCAGAGGGGGAGCCACCA | 1158 |
| 5637 | UUCUCGGGGUCCAGUGCAU | 840 | 5637 | UUCUCGGGGUCCAGUGCAU | 840 | 5655 | AUGCACUGGACCCCGAGAA | 1159 |
| 5655 | UUUUGUUUCUGUAUAUGAU | 841 | 5655 | UUUUGUUUCUGUAUAUGAU | 841 | 5673 | AUCAUAUACAGAAACAAAA | 1160 |
| 5673 | UUCUCUGUGGUUUUUUUUG | 842 | 5673 | UUCUCUGUGGUUUUUUUUG | 842 | 5691 | CAAAAAAAACCACAGAGAA | 1161 |
| 5691 | GAAUCCAAAUCUGUCCUCU | 843 | 5691 | GAAUCCAAAUCUGUCCUCU | 843 | 5709 | AGAGGACAGAUUUGGAUUC | 1162 |
| 5709 | UGUAGUAUUUUUUAAAUAA | 844 | 5709 | UGUAGUAUUUUUUAAAUAA | 844 | 5727 | UUAUUUAAAAAAUACUACA | 1163 |
| 5724 | AUAAAUCAGUGUUUACAUU | 845 | 5724 | AUAAAUCAGUGUUUACAUU | 845 | 5742 | AAUGUAAACACUGAUUUAU | 1164 |

HSA131467 (b2a2)

| | | | | | | | | |
|---|---|---|---|---|---|---|---|---|
| 281 | UGACCAUCAAUAAGGAAGA | 1165 | 281 | UGACCAUCAAUAAGGAAGA | 1165 | 299 | UCUUCCUUAUUGAUGGUCA | 1183 |
| 282 | GACCAUCAAUAAGGAAGAA | 1166 | 282 | GACCAUCAAUAAGGAAGAA | 1166 | 300 | UUCUUCCUUAUUGAUGGUC | 1184 |
| 283 | ACCAUCAAUAAGGAAGAAG | 1167 | 283 | ACCAUCAAUAAGGAAGAAG | 1167 | 301 | CUUCUUCCUUAUUGAUGGU | 1185 |
| 284 | CCAUCAAUAAGGAAGAAGC | 1168 | 284 | CCAUCAAUAAGGAAGAAGC | 1168 | 302 | GCUUCUUCCUUAUUGAUGG | 1186 |
| 285 | CAUCAAUAAGGAAGAAGCC | 1169 | 285 | CAUCAAUAAGGAAGAAGCC | 1169 | 303 | GGCUUCUUCCUUAUUGAUG | 1187 |
| 286 | AUCAAUAAGGAAGAAGCCC | 1170 | 286 | AUCAAUAAGGAAGAAGCCC | 1170 | 304 | GGGCUUCUUCCUUAUUGAU | 1188 |
| 287 | UCAAUAAGGAAGAAGCCCU | 1171 | 287 | UCAAUAAGGAAGAAGCCCU | 1171 | 305 | AGGGCUUCUUCCUUAUUGA | 1189 |
| 288 | CAAUAAGGAAGAAGCCCUU | 1172 | 288 | CAAUAAGGAAGAAGCCCUU | 1172 | 306 | AAGGGCUUCUUCCUUAUUG | 1190 |
| 289 | AAUAAGGAAGAAGCCCUUC | 1173 | 289 | AAUAAGGAAGAAGCCCUUC | 1173 | 307 | GAAGGGCUUCUUCCUUAUU | 1191 |
| 290 | AUAAGGAAGAAGCCCUUCA | 1174 | 290 | AUAAGGAAGAAGCCCUUCA | 1174 | 308 | UGAAGGGCUUCUUCCUUAU | 1192 |
| 291 | UAAGGAAGAAGCCCUUCAG | 1175 | 291 | UAAGGAAGAAGCCCUUCAG | 1175 | 309 | CUGAAGGGCUUCUUCCUUA | 1193 |
| 292 | AAGGAAGAAGCCCUUCAGC | 1176 | 292 | AAGGAAGAAGCCCUUCAGC | 1176 | 310 | GCUGAAGGGCUUCUUCCUU | 1194 |
| 293 | AGGAAGAAGCCCUUCAGCG | 1177 | 293 | AGGAAGAAGCCCUUCAGCG | 1177 | 311 | CGCUGAAGGGCUUCUUCCU | 1195 |
| 294 | GGAAGAAGCCCUUCAGCGG | 1178 | 294 | GGAAGAAGCCCUUCAGCGG | 1178 | 312 | CCGCUGAAGGGCUUCUUCC | 1196 |
| 295 | GAAGAAGCCCUUCAGCGGC | 1179 | 295 | GAAGAAGCCCUUCAGCGGC | 1179 | 313 | GCCGCUGAAGGGCUUCUUC | 1197 |
| 296 | AAGAAGCCCUUCAGCGGCC | 1180 | 296 | AAGAAGCCCUUCAGCGGCC | 1180 | 314 | GGCCGCUGAAGGGCUUCUU | 1198 |
| 297 | AGAAGCCCUUCAGCGGCCA | 1181 | 297 | AGAAGCCCUUCAGCGGCCA | 1181 | 315 | UGGCCGCUGAAGGGCUUCU | 1199 |
| 298 | GAAGCCCUUCAGCGGCCAG | 1182 | 298 | GAAGCCCUUCAGCGGCCAG | 1182 | 316 | CUGGCCGCUGAAGGGCUUC | 1200 |

HSA131466 (b3a2)

| | | | | | | | | |
|---|---|---|---|---|---|---|---|---|
| 356 | GAUUUAAGCAGAGUUCAAA | 1201 | 356 | GAUUUAAGCAGAGUUCAAA | 1201 | 374 | UUUGAACUCUGCUUAAAUC | 1219 |
| 357 | AUUUAAGCAGAGUUCAAAA | 1202 | 357 | AUUUAAGCAGAGUUCAAAA | 1202 | 375 | UUUUGAACUCUGCUUAAAU | 1220 |
| 358 | UUUAAGCAGAGUUCAAAAG | 1203 | 358 | UUUAAGCAGAGUUCAAAAG | 1203 | 376 | CUUUUGAACUCUGCUUAAA | 1221 |
| 359 | UUAAGCAGAGUUCAAAAGC | 1204 | 359 | UUAAGCAGAGUUCAAAAGC | 1204 | 377 | GCUUUUGAACUCUGCUUAA | 1222 |
| 360 | UAAGCAGAGUUCAAAAGCC | 1205 | 360 | UAAGCAGAGUUCAAAAGCC | 1205 | 378 | GGCUUUUGAACUCUGCUUA | 1223 |
| 361 | AAGCAGAGUUCAAAAGCCC | 1206 | 361 | AAGCAGAGUUCAAAAGCCC | 1206 | 379 | GGGCUUUUGAACUCUGCUU | 1224 |
| 362 | AGCAGAGUUCAAAAGCCCU | 1207 | 362 | AGCAGAGUUCAAAAGCCCU | 1207 | 380 | AGGGCUUUUGAACUCUGCU | 1225 |
| 363 | GCAGAGUUCAAAAGCCCUU | 1208 | 363 | GCAGAGUUCAAAAGCCCUU | 1208 | 381 | AAGGGCUUUUGAACUCUGC | 1226 |
| 364 | CAGAGUUCAAAAGCCCUUC | 1209 | 364 | CAGAGUUCAAAAGCCCUUC | 1209 | 382 | GAAGGGCUUUUGAACUCUG | 1227 |
| 365 | AGAGUUCAAAAGCCCUUCA | 1210 | 365 | AGAGUUCAAAAGCCCUUCA | 1210 | 383 | UGAAGGGCUUUUGAACUCU | 1228 |
| 366 | GAGUUCAAAAGCCCUUCAG | 1211 | 366 | GAGUUCAAAAGCCCUUCAG | 1211 | 384 | CUGAAGGGCUUUUGAACUC | 1229 |
| 367 | AGUUCAAAAGCCCUUCAGC | 1212 | 367 | AGUUCAAAAGCCCUUCAGC | 1212 | 385 | GCUGAAGGGCUUUUGAACU | 1230 |
| 368 | GUUCAAAAGCCCUUCAGCG | 1213 | 368 | GUUCAAAAGCCCUUCAGCG | 1213 | 386 | CGCUGAAGGGCUUUUGAAC | 1231 |
| 369 | UUCAAAAGCCCUUCAGCGG | 1214 | 369 | UUCAAAAGCCCUUCAGCGG | 1214 | 387 | CCGCUGAAGGGCUUUUGAA | 1232 |
| 370 | UCAAAAGCCCUUCAGCGGC | 1215 | 370 | UCAAAAGCCCUUCAGCGGC | 1215 | 388 | GCCGCUGAAGGGCUUUUGA | 1233 |
| 371 | CAAAAGCCCUUCAGCGGCC | 1216 | 371 | CAAAAGCCCUUCAGCGGCC | 1216 | 389 | GGCCGCUGAAGGGCUUUUG | 1234 |
| 372 | AAAAGCCCUUCAGCGGCCA | 1217 | 372 | AAAAGCCCUUCAGCGGCCA | 1217 | 390 | UGGCCGCUGAAGGGCUUUU | 1235 |
| 373 | AAAGCCCUUCAGCGGCCAG | 1218 | 373 | AAAGCCCUUCAGCGGCCAG | 1218 | 391 | CUGGCCGCUGAAGGGCUUU | 1236 |

NM_004449|ERG2

| 1 | GUCCGCGCGUGUCCGCGCC | 1237 | 1 | GUCCGCGCGUGUCCGCGCC | 1237 | 23 | GGCGCGGACACGCGCGGAC | 1413 |
|---|---|---|---|---|---|---|---|---|
| 19 | CCGCGUGUGCCAGCGCGCG | 1238 | 19 | CCGCGUGUGCCAGCGCGCG | 1238 | 41 | CGCGCGCUGGCACACGCGG | 1414 |
| 37 | GUGCCUUGGCCGUGCGCGC | 1239 | 37 | GUGCCUUGGCCGUGCGCGC | 1239 | 59 | GCGCGCACGGCCAAGGCAC | 1415 |
| 55 | CCGAGCCGGGUCGCACUAA | 1240 | 55 | CCGAGCCGGGUCGCACUAA | 1240 | 77 | UUAGUGCGACCCGGCUCGG | 1416 |
| 73 | ACUCCCUCGGCGCCGACGG | 1241 | 73 | ACUCCCUCGGCGCCGACGG | 1241 | 95 | CCGUCGGCGCCGAGGGAGU | 1417 |
| 91 | GCGGCGCUAACCUCUCGGU | 1242 | 91 | GCGGCGCUAACCUCUCGGU | 1242 | 113 | ACCGAGAGGUUAGCGCCGC | 1418 |
| 109 | UUAUUCCAGGAUCUUUGGA | 1243 | 109 | UUAUUCCAGGAUCUUUGGA | 1243 | 131 | UCCAAAGAUCCUGGAAUAA | 1419 |
| 127 | AGACCCGAGGAAAGCCGUG | 1244 | 127 | AGACCCGAGGAAAGCCGUG | 1244 | 149 | CACGGCUUUCCUCGGGUCU | 1420 |
| 145 | GUUGACCAAAAGCAAGACA | 1245 | 145 | GUUGACCAAAAGCAAGACA | 1245 | 167 | UGUCUUGCUUUUGGUCAAC | 1421 |
| 163 | AAAUGACUCACAGAGAAAA | 1246 | 163 | AAAUGACUCACAGAGAAAA | 1246 | 185 | UUUUCUCUGUGAGUCAUUU | 1422 |
| 181 | AAAGAUGGCAGAACCAAGG | 1247 | 181 | AAAGAUGGCAGAACCAAGG | 1247 | 203 | CCUUGGUUCUGCCAUCUUU | 1423 |
| 199 | GGCAACUAAAGCCGUCAGG | 1248 | 199 | GGCAACUAAAGCCGUCAGG | 1248 | 221 | CCUGACGGCUUUAGUUGCC | 1424 |
| 217 | GUUCUGAACAGCUGGUAGA | 1249 | 217 | GUUCUGAACAGCUGGUAGA | 1249 | 239 | UCUACCAGCUGUUCAGAAC | 1425 |
| 235 | AUGGGCUGGCUUACUGAAG | 1250 | 235 | AUGGGCUGGCUUACUGAAG | 1250 | 257 | CUUCAGUAAGCCAGCCCAU | 1426 |
| 253 | GGACAUGAUUCAGACUGUC | 1251 | 253 | GGACAUGAUUCAGACUGUC | 1251 | 275 | GACAGUCUGAAUCAUGUCC | 1427 |
| 271 | CCCGGACCCAGCAGCUCAU | 1252 | 271 | CCCGGACCCAGCAGCUCAU | 1252 | 293 | AUGAGCUGCUGGGUCCGGG | 1428 |
| 289 | UAUCAAGGAAGCCUUAUCA | 1253 | 289 | UAUCAAGGAAGCCUUAUCA | 1253 | 311 | UGAUAAGGCUUCCUUGAUA | 1429 |
| 307 | AGUUGUGAGUGAGGACCAG | 1254 | 307 | AGUUGUGAGUGAGGACCAG | 1254 | 329 | CUGGUCCUCACUCACAACU | 1430 |
| 325 | GUCGUUGUUUGAGUGUGCC | 1255 | 325 | GUCGUUGUUUGAGUGUGCC | 1255 | 347 | GGCACACUCAAACAACGAC | 1431 |
| 343 | CUACGGAACGCCACACCUG | 1256 | 343 | CUACGGAACGCCACACCUG | 1256 | 365 | CAGGUGUGGCGUUCCGUAG | 1432 |
| 361 | GGCUAAGACAGAGAUGACC | 1257 | 361 | GGCUAAGACAGAGAUGACC | 1257 | 383 | GGUCAUCUCUGUCUUAGCC | 1433 |
| 379 | CGCGUCCUCCUCCAGCGAC | 1258 | 379 | CGCGUCCUCCUCCAGCGAC | 1258 | 401 | GUCGCUGGAGGAGGACGCG | 1434 |
| 397 | CUAUGGACAGACUUCCAAG | 1259 | 397 | CUAUGGACAGACUUCCAAG | 1259 | 419 | CUUGGAAGUCUGUCCAUAG | 1435 |
| 415 | GAUGAGCCCACGCGUCCCU | 1260 | 415 | GAUGAGCCCACGCGUCCCU | 1260 | 437 | AGGGACGCGUGGGCUCAUC | 1436 |
| 433 | UCAGCAGGAUUGGCUGUCU | 1261 | 433 | UCAGCAGGAUUGGCUGUCU | 1261 | 455 | AGACAGCCAAUCCUGCUGA | 1437 |
| 451 | UCAACCCCCAGCCAGGGUC | 1262 | 451 | UCAACCCCCAGCCAGGGUC | 1262 | 473 | GACCCUGGCUGGGGGUUGA | 1438 |
| 469 | CACCAUCAAAAUGGAAUGU | 1263 | 469 | CACCAUCAAAAUGGAAUGU | 1263 | 491 | ACAUUCCAUUUUGAUGGUG | 1439 |
| 487 | UAACCCUAGCCAGGUGAAU | 1264 | 487 | UAACCCUAGCCAGGUGAAU | 1264 | 509 | AUUCACCUGGCUAGGGUUA | 1440 |
| 505 | UGGCUCAAGGAACUCUCCU | 1265 | 505 | UGGCUCAAGGAACUCUCCU | 1265 | 527 | AGGAGAGUUCCUUGAGCCA | 1441 |
| 523 | UGAUGAAUGCAGUGUGGCC | 1266 | 523 | UGAUGAAUGCAGUGUGGCC | 1266 | 545 | GGCCACACUGCAUUCAUCA | 1442 |
| 541 | CAAAGGCGGGAAGAUGGUG | 1267 | 541 | CAAAGGCGGGAAGAUGGUG | 1267 | 563 | CACCAUCUUCCCGCCUUUG | 1443 |
| 559 | GGGCAGCCCAGACACCGUU | 1268 | 559 | GGGCAGCCCAGACACCGUU | 1268 | 581 | AACGGUGUCUGGGCUGCCC | 1444 |
| 577 | UGGGAUGAACUACGGCAGC | 1269 | 577 | UGGGAUGAACUACGGCAGC | 1269 | 599 | GCUGCCGUAGUUCAUCCCA | 1445 |
| 595 | CUACAUGGAGGAGAAGCAC | 1270 | 595 | CUACAUGGAGGAGAAGCAC | 1270 | 617 | GUGCUUCUCCUCCAUGUAG | 1446 |
| 613 | CAUGCCACCCCCAAACAUG | 1271 | 613 | CAUGCCACCCCCAAACAUG | 1271 | 635 | CAUGUUUGGGGGUGGCAUG | 1447 |
| 631 | GACCACGAACGAGCGCAGA | 1272 | 631 | GACCACGAACGAGCGCAGA | 1272 | 653 | UCUGCGCUCGUUCGUGGUC | 1448 |
| 649 | AGUUAUCGUGCCAGCAGAU | 1273 | 649 | AGUUAUCGUGCCAGCAGAU | 1273 | 671 | AUCUGCUGGCACGAUAACU | 1449 |
| 667 | UCCUACGCUAUGGAGUACA | 1274 | 667 | UCCUACGCUAUGGAGUACA | 1274 | 689 | UGUACUCCAUAGCGUAGGA | 1450 |
| 685 | AGACCAUGUGCGGCAGUGG | 1275 | 685 | AGACCAUGUGCGGCAGUGG | 1275 | 707 | CCACUGCCGCACAUGGUCU | 1451 |
| 703 | GCUGGAGUGGGCGGUGAAA | 1276 | 703 | GCUGGAGUGGGCGGUGAAA | 1276 | 725 | UUUCACCGCCCACUCCAGC | 1452 |
| 721 | AGAAUAUGGCCUUCCAGAC | 1277 | 721 | AGAAUAUGGCCUUCCAGAC | 1277 | 743 | GUCUGGAAGGCCAUAUUCU | 1453 |
| 739 | CGUCAACAUCUUGUUAUUC | 1278 | 739 | CGUCAACAUCUUGUUAUUC | 1278 | 761 | GAAUAACAAGAUGUUGACG | 1454 |
| 757 | CCAGAACAUCGAUGGGAAG | 1279 | 757 | CCAGAACAUCGAUGGGAAG | 1279 | 779 | CUUCCCAUCGAUGUUCUGG | 1455 |
| 775 | GGAACUGUGCAAGAUGACC | 1280 | 775 | GGAACUGUGCAAGAUGACC | 1280 | 797 | GGUCAUCUUGCACAGUUCC | 1456 |
| 793 | CAAGGACGACUUCCAGAGG | 1281 | 793 | CAAGGACGACUUCCAGAGG | 1281 | 815 | CCUCUGGAAGUCGUCCUUG | 1457 |
| 811 | GCUCACCCCCAGCUACAAC | 1282 | 811 | GCUCACCCCCAGCUACAAC | 1282 | 833 | GUUGUAGCUGGGGGUGAGC | 1458 |
| 829 | CGCCGACAUCCUUCUCUCA | 1283 | 829 | CGCCGACAUCCUUCUCUCA | 1283 | 851 | UGAGAGAAGGAUGUCGGCG | 1459 |
| 847 | ACAUCUCCACUACCUCAGA | 1284 | 847 | ACAUCUCCACUACCUCAGA | 1284 | 869 | UCUGAGGUAGUGGAGAUGU | 1460 |
| 865 | AGAGACUCCUCUUCCACAU | 1285 | 865 | AGAGACUCCUCUUCCACAU | 1285 | 887 | AUGUGGAAGAGGAGUCUCU | 1461 |
| 883 | UUUGACUUCAGAUGAUGUU | 1286 | 883 | UUUGACUUCAGAUGAUGUU | 1286 | 905 | AACAUCAUCUGAAGUCAAA | 1462 |
| 901 | UGAUAAAGCCUUACAAAAC | 1287 | 901 | UGAUAAAGCCUUACAAAAC | 1287 | 923 | GUUUUGUAAGGCUUUAUCA | 1463 |
| 919 | CUCUCCACGGUUAAUGCAU | 1288 | 919 | CUCUCCACGGUUAAUGCAU | 1288 | 941 | AUGCAUUAACCGUGGAGAG | 1464 |
| 937 | UGCUAGAAACACAGAUUUA | 1289 | 937 | UGCUAGAAACACAGAUUUA | 1289 | 959 | UAAAUCUGUGUUUCUAGCA | 1465 |
| 955 | ACCAUAUGAGCCCCCCAGG | 1290 | 955 | ACCAUAUGAGCCCCCCAGG | 1290 | 977 | CCUGGGGGGCUCAUAUGGU | 1466 |
| 973 | GAGAUCAGCCUGGACCGGU | 1291 | 973 | GAGAUCAGCCUGGACCGGU | 1291 | 995 | ACCGGUCCAGGCUGAUCUC | 1467 |
| 991 | UCACGGCCACCCCACGCCC | 1292 | 991 | UCACGGCCACCCCACGCCC | 1292 | 1013 | GGGCGUGGGGUGGCCGUGA | 1468 |
| 1009 | CCAGUCGAAAGCUGCUCAA | 1293 | 1009 | CCAGUCGAAAGCUGCUCAA | 1293 | 1031 | UUGAGCAGCUUUCGACUGG | 1469 |
| 1027 | ACCAUCUCCUUCCACAGUG | 1294 | 1027 | ACCAUCUCCUUCCACAGUG | 1294 | 1049 | CACUGUGGAAGGAGAUGGU | 1470 |
| 1045 | GCCCAAAACUGAAGACCAG | 1295 | 1045 | GCCCAAAACUGAAGACCAG | 1295 | 1067 | CUGGUCUUCAGUUUUGGGC | 1471 |
| 1063 | GCGUCCUCAGUUAGAUCCU | 1296 | 1063 | GCGUCCUCAGUUAGAUCCU | 1296 | 1085 | AGGAUCUAACUGAGGACGC | 1472 |
| 1081 | UUAUCAGAUUCUUGGACCA | 1297 | 1081 | UUAUCAGAUUCUUGGACCA | 1297 | 1103 | UGGUCCAAGAAUCUGAUAA | 1473 |
| 1099 | AACAAGUAGCCGCCUUGCA | 1298 | 1099 | AACAAGUAGCCGCCUUGCA | 1298 | 1121 | UGCAAGGCGGCUACUUGUU | 1474 |
| 1117 | AAAUCCAGGCAGUGGCCAG | 1299 | 1117 | AAAUCCAGGCAGUGGCCAG | 1299 | 1139 | CUGGCCACUGCCUGGAUUU | 1475 |
| 1135 | GAUCCAGCUUUGGCAGUUC | 1300 | 1135 | GAUCCAGCUUUGGCAGUUC | 1300 | 1157 | GAACUGCCAAAGCUGGAUC | 1476 |
| 1153 | CCUCCUGGAGCUCCUGUCG | 1301 | 1153 | CCUCCUGGAGCUCCUGUCG | 1301 | 1175 | CGACAGGAGCUCCAGGAGG | 1477 |
| 1171 | GGACAGCUCCAACUCCAGC | 1302 | 1171 | GGACAGCUCCAACUCCAGC | 1302 | 1193 | GCUGGAGUUGGAGCUGUCC | 1478 |
| 1189 | CUGCAUCACCUGGGAAGGC | 1303 | 1189 | CUGCAUCACCUGGGAAGGC | 1303 | 1211 | GCCUUCCCAGGUGAUGCAG | 1479 |
| 1207 | CACCAACGGGGAGUUCAAG | 1304 | 1207 | CACCAACGGGGAGUUCAAG | 1304 | 1229 | CUUGAACUCCCCGUUGGUG | 1480 |
| 1225 | GAUGACGGAUCCCGACGAG | 1305 | 1225 | GAUGACGGAUCCCGACGAG | 1305 | 1247 | CUCGUCGGGAUCCGUCAUC | 1481 |
| 1243 | GGUGGCCCGGCGCUGGGGA | 1306 | 1243 | GGUGGCCCGGCGCUGGGGA | 1306 | 1265 | UCCCCAGCGCCGGGCCACC | 1482 |
| 1261 | AGAGCGGAAGAGCAAACCC | 1307 | 1261 | AGAGCGGAAGAGCAAACCC | 1307 | 1283 | GGGUUUGCUCUUCCGCUCU | 1483 |
| 1279 | CAACAUGAACUACGAUAAG | 1308 | 1279 | CAACAUGAACUACGAUAAG | 1308 | 1301 | CUUAUCGUAGUUCAUGUUG | 1484 |
| 1297 | GCUCAGCCGCGCCCUCCGU | 1309 | 1297 | GCUCAGCCGCGCCCUCCGU | 1309 | 1319 | ACGGAGGGCGCGGCUGAGC | 1485 |
| 1315 | UUACUACUAUGACAAGAAC | 1310 | 1315 | UUACUACUAUGACAAGAAC | 1310 | 1337 | GUUCUUGUCAUAGUAGUAA | 1486 |
| 1333 | CAUCAUGACCAAGGUCCAU | 1311 | 1333 | CAUCAUGACCAAGGUCCAU | 1311 | 1355 | AUGGACCUUGGUCAUGAUG | 1487 |
| 1351 | UGGGAAGCGCUACGCCUAC | 1312 | 1351 | UGGGAAGCGCUACGCCUAC | 1312 | 1373 | GUAGGCGUAGCGCUUCCCA | 1488 |
| 1369 | CAAGUUCGACUUCCACGGG | 1313 | 1369 | CAAGUUCGACUUCCACGGG | 1313 | 1391 | CCCGUGGAAGUCGAACUUG | 1489 |
| 1387 | GAUCGCCCAGGCCCUCCAG | 1314 | 1387 | GAUCGCCCAGGCCCUCCAG | 1314 | 1409 | CUGGAGGGCCUGGGCGAUC | 1490 |
| 1405 | GCCCCACCCCCCGGAGUCA | 1315 | 1405 | GCCCCACCCCCCGGAGUCA | 1315 | 1427 | UGACUCCGGGGGGUGGGGC | 1491 |
| 1423 | AUCUCUGUACAAGUACCCC | 1316 | 1423 | AUCUCUGUACAAGUACCCC | 1316 | 1445 | GGGGUACUUGUACAGAGAU | 1492 |
| 1441 | CUCAGACCUCCCGUACAUG | 1317 | 1441 | CUCAGACCUCCCGUACAUG | 1317 | 1463 | CAUGUACGGGAGGUCUGAG | 1493 |
| 1459 | GGGCUCCUAUCACGCCCAC | 1318 | 1459 | GGGCUCCUAUCACGCCCAC | 1318 | 1481 | GUGGGCGUGAUAGGAGCCC | 1494 |
| 1477 | CCCACAGAAGAUGAACUUU | 1319 | 1477 | CCCACAGAAGAUGAACUUU | 1319 | 1499 | AAAGUUCAUCUUCUGUGGG | 1495 |
| 1495 | UGUGGCGCCCCACCCUCCA | 1320 | 1495 | UGUGGCGCCCCACCCUCCA | 1320 | 1517 | UGGAGGGUGGGGCGCCACA | 1496 |
| 1513 | AGCCCUCCCCGUGACAUCU | 1321 | 1513 | AGCCCUCCCCGUGACAUCU | 1321 | 1535 | AGAUGUCACGGGGAGGGCU | 1497 |
| 1531 | UUCCAGUUUUUUUGCUGCC | 1322 | 1531 | UUCCAGUUUUUUUGCUGCC | 1322 | 1553 | GGCAGCAAAAAAACUGGAA | 1498 |
| 1549 | CCCAAACCCAUACUGGAAU | 1323 | 1549 | CCCAAACCCAUACUGGAAU | 1323 | 1571 | AUUCCAGUAUGGGUUUGGG | 1499 |
| 1567 | UUCACCAACUGGGGGUAUA | 1324 | 1567 | UUCACCAACUGGGGGUAUA | 1324 | 1589 | UAUACCCCCAGUUGGUGAA | 1500 |
| 1585 | AUACCCCAACACUAGGCUC | 1325 | 1585 | AUACCCCAACACUAGGCUC | 1325 | 1607 | GAGCCUAGUGUUGGGGUAU | 1501 |
| 1603 | CCCCACCAGCCAUAUGCCU | 1326 | 1603 | CCCCACCAGCCAUAUGCCU | 1326 | 1625 | AGGCAUAUGGCUGGUGGGG | 1502 |
| 1621 | UUCUCAUCUGGGCACUUAC | 1327 | 1621 | UUCUCAUCUGGGCACUUAC | 1327 | 1643 | GUAAGUGCCCAGAUGAGAA | 1503 |
| 1639 | CUACUAAAGACCUGGCGGA | 1328 | 1639 | CUACUAAAGACCUGGCGGA | 1328 | 1661 | UCCGCCAGGUCUUUAGUAG | 1504 |
| 1657 | AGGCUUUUCCCAUCAGCGU | 1329 | 1657 | AGGCUUUUCCCAUCAGCGU | 1329 | 1679 | ACGCUGAUGGGAAAAGCCU | 1505 |
| 1675 | UGCAUUCACCAGCCCAUCG | 1330 | 1675 | UGCAUUCACCAGCCCAUCG | 1330 | 1697 | CGAUGGGCUGGUGAAUGCA | 1506 |
| 1693 | GCCACAAACUCUAUCGGAG | 1331 | 1693 | GCCACAAACUCUAUCGGAG | 1331 | 1715 | CUCCGAUAGAGUUUGUGGC | 1507 |
| 1711 | GAACAUGAAUCAAAAGUGC | 1332 | 1711 | GAACAUGAAUCAAAAGUGC | 1332 | 1733 | GCACUUUUGAUUCAUGUUC | 1508 |
| 1729 | CCUCAAGAGGAAUGAAAAA | 1333 | 1729 | CCUCAAGAGGAAUGAAAAA | 1333 | 1751 | UUUUUCAUUCCUCUUGAGG | 1509 |
| 1747 | AAGCUUUACUGGGGCUGGG | 1334 | 1747 | AAGCUUUACUGGGGCUGGG | 1334 | 1769 | CCCAGCCCCAGUAAAGCUU | 1510 |
| 1765 | GGAAGGAAGCCGGGGAAGA | 1335 | 1765 | GGAAGGAAGCCGGGGAAGA | 1335 | 1787 | UCUUCCCCGGCUUCCUUCC | 1511 |
| 1783 | AGAUCCAAAGACUCUUGGG | 1336 | 1783 | AGAUCCAAAGACUCUUGGG | 1336 | 1805 | CCCAAGAGUCUUUGGAUCU | 1512 |
| 1801 | GAGGGAGUUACUGAAGUCU | 1337 | 1801 | GAGGGAGUUACUGAAGUCU | 1337 | 1823 | AGACUUCAGUAACUCCCUC | 1513 |
| 1819 | UUACUACAGAAAUGAGGAG | 1338 | 1819 | UUACUACAGAAAUGAGGAG | 1338 | 1841 | CUCCUCAUUUCUGUAGUAA | 1514 |
| 1837 | GGAUGCUAAAAAUGUCACG | 1339 | 1837 | GGAUGCUAAAAAUGUCACG | 1339 | 1859 | CGUGACAUUUUUAGCAUCC | 1515 |
| 1855 | GAAUAUGGACAUAUCAUCU | 1340 | 1855 | GAAUAUGGACAUAUCAUCU | 1340 | 1877 | AGAUGAUAUGUCCAUAUUC | 1516 |
| 1873 | UGUGGACUGACCUUGUAAA | 1341 | 1873 | UGUGGACUGACCUUGUAAA | 1341 | 1895 | UUUACAAGGUCAGUCCACA | 1517 |
| 1891 | AAGACAGUGUAUGUAGAAG | 1342 | 1891 | AAGACAGUGUAUGUAGAAG | 1342 | 1913 | CUUCUACAUACACUGUCUU | 1518 |
| 1909 | GCAUGAAGUCUUAAGGACA | 1343 | 1909 | GCAUGAAGUCUUAAGGACA | 1343 | 1931 | UGUCCUUAAGACUUCAUGC | 1519 |
| 1927 | AAAGUGCCAAAGAAAGUGG | 1344 | 1927 | AAAGUGCCAAAGAAAGUGG | 1344 | 1949 | CCACUUUCUUUGGCACUUU | 1520 |
| 1945 | GUCUUAAGAAAUGUAUAAA | 1345 | 1945 | GUCUUAAGAAAUGUAUAAA | 1345 | 1967 | UUUAUACAUUUCUUAAGAC | 1521 |
| 1963 | ACUUUAGAGUAGAGUUUGA | 1346 | 1963 | ACUUUAGAGUAGAGUUUGA | 1346 | 1985 | UCAAACUCUACUCUAAAGU | 1522 |
| 1981 | AAUCCCACUAAUGCAAACU | 1347 | 1981 | AAUCCCACUAAUGCAAACU | 1347 | 2003 | AGUUUGCAUUAGUGGGAUU | 1523 |
| 1999 | UGGGAUGAAACUAAAGCAA | 1348 | 1999 | UGGGAUGAAACUAAAGCAA | 1348 | 2021 | UUGCUUUAGUUUCAUCCCA | 1524 |
| 2017 | AUAGAAACAACACAGUUUU | 1349 | 2017 | AUAGAAACAACACAGUUUU | 1349 | 2039 | AAAACUGUGUUGUUUCUAU | 1525 |
| 2035 | UGACCUAACAUACCGUUUA | 1350 | 2035 | UGACCUAACAUACCGUUUA | 1350 | 2057 | UAAACGGUAUGUUAGGUCA | 1526 |
| 2053 | AUAAUGCCAUUUUAAGGAA | 1351 | 2053 | AUAAUGCCAUUUUAAGGAA | 1351 | 2075 | UUCCUUAAAAUGGCAUUAU | 1527 |
| 2071 | AAACUACCUGUAUUUAAAA | 1352 | 2071 | AAACUACCUGUAUUUAAAA | 1352 | 2093 | UUUUAAAUACAGGUAGUUU | 1528 |
| 2089 | AAUAGUUUCAUAUCAAAAA | 1353 | 2089 | AAUAGUUUCAUAUCAAAAA | 1353 | 2111 | UUUUUGAUAUGAAACUAUU | 1529 |
| 2107 | ACAAGAGAAAAGACACGAG | 1354 | 2107 | ACAAGAGAAAAGACACGAG | 1354 | 2129 | CUCGUGUCUUUUCUCUUGU | 1530 |
| 2125 | GAGAGACUGUGGCCCAUCA | 1355 | 2125 | GAGAGACUGUGGCCCAUCA | 1355 | 2147 | UGAUGGGCCACAGUCUCUC | 1531 |
| 2143 | AACAGACGUUGAUAUGCAA | 1356 | 2143 | AACAGACGUUGAUAUGCAA | 1356 | 2165 | UUGCAUAUCAACGUCUGUU | 1532 |
| 2161 | ACUGCAUGGCAUGUGCUGU | 1357 | 2161 | ACUGCAUGGCAUGUGCUGU | 1357 | 2183 | ACAGCACAUGCCAUGCAGU | 1533 |
| 2179 | UUUUGGUUGAAAUCAAAUA | 1358 | 2179 | UUUUGGUUGAAAUCAAAUA | 1358 | 2201 | UAUUUGAUUUCAACCAAAA | 1534 |
| 2197 | ACAUUCCGUUUGAUGGACA | 1359 | 2197 | ACAUUCCGUUUGAUGGACA | 1359 | 2219 | UGUCCAUCAAACGGAAUGU | 1535 |
| 2215 | AGCUGUCAGCUUUCUCAAA | 1360 | 2215 | AGCUGUCAGCUUUCUCAAA | 1360 | 2237 | UUUGAGAAAGCUGACAGCU | 1536 |
| 2233 | ACUGUGAAGAUGACCCAAA | 1361 | 2233 | ACUGUGAAGAUGACCCAAA | 1361 | 2255 | UUUGGGUCAUCUUCACAGU | 1537 |
| 2251 | AGUUUCCAACUCCUUUACA | 1362 | 2251 | AGUUUCCAACUCCUUUACA | 1362 | 2273 | UGUAAAGGAGUUGGAAACU | 1538 |
| 2269 | AGUAUUACCGGGACUAUGA | 1363 | 2269 | AGUAUUACCGGGACUAUGA | 1363 | 2291 | UCAUAGUCCCGGUAAUACU | 1539 |
| 2287 | AACUAAAAGGUGGGACUGA | 1364 | 2287 | AACUAAAAGGUGGGACUGA | 1364 | 2309 | UCAGUCCCACCUUUUAGUU | 1540 |
| 2305 | AGGAUGUGUAUAGAGUGAG | 1365 | 2305 | AGGAUGUGUAUAGAGUGAG | 1365 | 2327 | CUCACUCUAUACACAUCCU | 1541 |
| 2323 | GCGUGUGAUUGUAGACAGA | 1366 | 2323 | GCGUGUGAUUGUAGACAGA | 1366 | 2345 | UCUGUCUACAAUCACACGC | 1542 |
| 2341 | AGGGGUGAAGAAGGAGGAG | 1367 | 2341 | AGGGGUGAAGAAGGAGGAG | 1367 | 2363 | CUCCUCCUUCUUCACCCCU | 1543 |
| 2359 | GGAAGAGGCAGAGAAGGAG | 1368 | 2359 | GGAAGAGGCAGAGAAGGAG | 1368 | 2381 | CUCCUUCUCUGCCUCUUCC | 1544 |
| 2377 | GGAGACCAGGCUGGGAAAG | 1369 | 2377 | GGAGACCAGGCUGGGAAAG | 1369 | 2399 | CUUUCCCAGCCUGGUCUCC | 1545 |
| 2395 | GAAACUUCUCAAGCAAUGA | 1370 | 2395 | GAAACUUCUCAAGCAAUGA | 1370 | 2417 | UCAUUGCUUGAGAAGUUUC | 1546 |
| 2413 | AAGACUGGACUCAGGACAU | 1371 | 2413 | AAGACUGGACUCAGGACAU | 1371 | 2435 | AUGUCCUGAGUCCAGUCUU | 1547 |
| 2431 | UUUGGGGACUGUGUACAAU | 1372 | 2431 | UUUGGGGACUGUGUACAAU | 1372 | 2453 | AUUGUACACAGUCCCCAAA | 1548 |
| 2449 | UGAGUUAUGGAGACUCGAG | 1373 | 2449 | UGAGUUAUGGAGACUCGAG | 1373 | 2471 | CUCGAGUCUCCAUAACUCA | 1549 |
| 2467 | GGGUUCAUGCAGUCAGUGU | 1374 | 2467 | GGGUUCAUGCAGUCAGUGU | 1374 | 2489 | ACACUGACUGCAUGAACCC | 1550 |
| 2485 | UUAUACCAAACCCAGUGUU | 1375 | 2485 | UUAUACCAAACCCAGUGUU | 1375 | 2507 | AACACUGGGUUUGGUAUAA | 1551 |
| 2503 | UAGGAGAAAGGACACAGCG | 1376 | 2503 | UAGGAGAAAGGACACAGCG | 1376 | 2525 | CGCUGUGUCCUUUCUCCUA | 1552 |
| 2521 | GUAAUGGAGAAAGGGAAGU | 1377 | 2521 | GUAAUGGAGAAAGGGAAGU | 1377 | 2543 | ACUUCCCUUUCUCCAUUAC | 1553 |
| 2539 | UAGUAGAAUUCAGAAACAA | 1378 | 2539 | UAGUAGAAUUCAGAAACAA | 1378 | 2561 | UUGUUUCUGAAUUCUACUA | 1554 |
| 2557 | AAAAUGCGCAUCUCUUUCU | 1379 | 2557 | AAAAUGCGCAUCUCUUUCU | 1379 | 2579 | AGAAAGAGAUGCGCAUUUU | 1555 |
| 2575 | UUUGUUUGUCAAAUGAAAA | 1380 | 2575 | UUUGUUUGUCAAAUGAAAA | 1380 | 2597 | UUUUCAUUUGACAAACAAA | 1556 |
| 2593 | AUUUUAACUGGAAUUGUCU | 1381 | 2593 | AUUUUAACUGGAAUUGUCU | 1381 | 2615 | AGACAAUUCCAGUUAAAAU | 1557 |
| 2611 | UGAUAUUUAAGAGAAACAU | 1382 | 2611 | UGAUAUUUAAGAGAAACAU | 1382 | 2633 | AUGUUUCUCUUAAAUAUCA | 1558 |
| 2629 | UUCAGGACCUCAUCAUUAU | 1383 | 2629 | UUCAGGACCUCAUCAUUAU | 1383 | 2651 | AUAAUGAUGAGGUCCUGAA | 1559 |
| 2647 | UGUGGGGGCUUUGUUCUCC | 1384 | 2647 | UGUGGGGGCUUUGUUCUCC | 1384 | 2669 | GGAGAACAAAGCCCCCACA | 1560 |
| 2665 | CACAGGGUCAGGUAAGAGA | 1385 | 2665 | CACAGGGUCAGGUAAGAGA | 1385 | 2687 | UCUCUUACCUGACCCUGUG | 1561 |
| 2683 | AUGGCCUUCUUGGCUGCCA | 1386 | 2683 | AUGGCCUUCUUGGCUGCCA | 1386 | 2705 | UGGCAGCCAAGAAGGCCAU | 1562 |
| 2701 | ACAAUCAGAAAUCACGCAG | 1387 | 2701 | ACAAUCAGAAAUCACGCAG | 1387 | 2723 | CUGCGUGAUUUCUGAUUGU | 1563 |
| 2719 | GGCAUUUUGGGUAGGCGGC | 1388 | 2719 | GGCAUUUUGGGUAGGCGGC | 1388 | 2741 | GCCGCCUACCCAAAAUGCC | 1564 |
| 2737 | CCUCCAGUUUUCCUUUGAG | 1389 | 2737 | CCUCCAGUUUUCCUUUGAG | 1389 | 2759 | CUCAAAGGAAAACUGGAGG | 1565 |
| 2755 | GUCGCGAACGCUGUGCGUU | 1390 | 2755 | GUCGCGAACGCUGUGCGUU | 1390 | 2777 | AACGCACAGCGUUCGCGAC | 1566 |
| 2773 | UUGUCAGAAUGAAGUAUAC | 1391 | 2773 | UUGUCAGAAUGAAGUAUAC | 1391 | 2795 | GUAUACUUCAUUCUGACAA | 1567 |
| 2791 | CAAGUCAAUGUUUUUCCCC | 1392 | 2791 | CAAGUCAAUGUUUUUCCCC | 1392 | 2813 | GGGGAAAAACAUUGACUUG | 1568 |
| 2809 | CCUUUUUAUAUAAUAAUUA | 1393 | 2809 | CCUUUUUAUAUAAUAAUUA | 1393 | 2831 | UAAUUAUUAUAUAAAAAGG | 1569 |
| 2827 | AUAUAACUUAUGCAUUUAU | 1394 | 2827 | AUAUAACUUAUGCAUUUAU | 1394 | 2849 | AUAAAUGCAUAAGUUAUAU | 1570 |
| 2845 | UACACUACGAGUUGAUCUC | 1395 | 2845 | UACACUACGAGUUGAUCUC | 1395 | 2867 | GAGAUCAACUCGUAGUGUA | 1571 |
| 2863 | CGGCCAGCCAAAGACACAC | 1396 | 2863 | CGGCCAGCCAAAGACACAC | 1396 | 2885 | GUGUGUCUUUGGCUGGCCG | 1572 |
| 2881 | CGACAAAAGAGACAAUCGA | 1397 | 2881 | CGACAAAAGAGACAAUCGA | 1397 | 2903 | UCGAUUGUCUCUUUUGUCG | 1573 |
| 2899 | AUAUAAUGUGGCCUUGAAU | 1398 | 2899 | AUAUAAUGUGGCCUUGAAU | 1398 | 2921 | AUUCAAGGCCACAUUAUAU | 1574 |
| 2917 | UUUUAACUCUGUAUGCUUA | 1399 | 2917 | UUUUAACUCUGUAUGCUUA | 1399 | 2939 | UAAGCAUACAGAGUUAAAA | 1575 |
| 2935 | AAUGUUUACAAUAUGAAGU | 1400 | 2935 | AAUGUUUACAAUAUGAAGU | 1400 | 2957 | ACUUCAUAUUGUAAACAUU | 1576 |
| 2953 | UUAUUAGUUCUUAGAAUGC | 1401 | 2953 | UUAUUAGUUCUUAGAAUGC | 1401 | 2975 | GCAUUCUAAGAACUAAUAA | 1577 |
| 2971 | CAGAAUGUAUGUAAUAAAA | 1402 | 2971 | CAGAAUGUAUGUAAUAAAA | 1402 | 2993 | UUUUAUUACAUACAUUCUG | 1578 |
| 2989 | AUAAGCUUGGCCUAGCAUG | 1403 | 2989 | AUAAGCUUGGCCUAGCAUG | 1403 | 3011 | CAUGCUAGGCCAAGCUUAU | 1579 |
| 3007 | GGCAAAUCAGAUUUAUACA | 1404 | 3007 | GGCAAAUCAGAUUUAUACA | 1404 | 3029 | UGUAUAAAUCUGAUUUGCC | 1580 |
| 3025 | AGGAGUCUGCAUUUGCACU | 1405 | 3025 | AGGAGUCUGCAUUUGCACU | 1405 | 3047 | AGUGCAAAUGCAGACUCCU | 1581 |
| 3043 | UUUUUUUAGUGACUAAAGU | 1406 | 3043 | UUUUUUUAGUGACUAAAGU | 1406 | 3065 | ACUUUAGUCACUAAAAAAA | 1582 |
| 3061 | UUGCUUAAUGAAAACAUGU | 1407 | 3061 | UUGCUUAAUGAAAACAUGU | 1407 | 3083 | ACAUGUUUUCAUUAAGCAA | 1583 |
| 3079 | UGCUGAAUGUUGUGGAUUU | 1408 | 3079 | UGCUGAAUGUUGUGGAUUU | 1408 | 3101 | AAAUCCACAACAUUCAGCA | 1584 |
| 3097 | UUGUGUUAUAAUUUACUUU | 1409 | 3097 | UUGUGUUAUAAUUUACUUU | 1409 | 3119 | AAAGUAAAUUAUAACACAA | 1585 |
| 3115 | UGUCCAGGAACUUGUGCAA | 1410 | 3115 | UGUCCAGGAACUUGUGCAA | 1410 | 3137 | UUGCACAAGUUCCUGGACA | 1586 |
| 3133 | AGGGAGAGCCAAGGAAAUA | 1411 | 3133 | AGGGAGAGCCAAGGAAAUA | 1411 | 3155 | UAUUUCCUUGGCUCUCCCU | 1587 |
| 3148 | AAUAGGAUGUUUGGCACCC | 1412 | 3148 | AAUAGGAUGUUUGGCACCC | 1412 | 3170 | GGGUGCCAAACAUCCUAUU | 1588 |
| The 3′-ends of the Upper sequence and the Lower sequence of the siRNA construct can include an overhang sequence, for example about 1, 2, 3, or 4 nucleotides in length, preferably 2 nucleotides in length, wherein the overhanging sequence of the lower sequence is optionally complementary to a portion of the target sequence. The upper sequence is also referred to as the sense strand, whereas the lower sequence is also referred to as the antisense strand. The upper and lower | | | | | | | | |
| # sequences in the Table can further comprise a chemical modification having Formulae I-VII, such as exemplary siNA contructs shown in FIGS. 4 and 5, or having modifications described in Table IV or any combination thereof. | | | | | | | | |

[0440] TABLE III

BCR-ABL and ERG Synthetic Modified siNA constructs
BCR-ABL

| Tar- | | | | | |
|---|---|---|---|---|---|
| get | | Seq | | | Seq |
| Pos | Target | ID | Aliases | Sequence | ID |
| 281 | UGACCAUCAAUAAGGAAGAAGCC | 1589 | b2a2:283U21 sense siNA | ACCAUCAAUAAGGAAGAAGTT | 1601 |
| 284 | CCAUCAAUAAGGAAGAAGCCCUU | 1590 | b2a2:286U21 sense siNA | AUCAAUAAGGAAGAAGCCCTT | 1602 |
| 280 | CUGACCAUCAAUAAGGAAGAAGC | 1591 | b2a2:282U21 sense siNA | GACCAUCAAUAAGGAAGAATT | 1603 |
| 288 | CAAUAAGGAAGAAGCCCUUCAGC | 1592 | b2a2:290U21 sense siNA | AUAAGGAAGAAGCCCUUCATT | 1604 |
| 281 | UGACCAUCAAUAAGGAAGAAGCC | 1589 | b2a2:301L21 antisense siNA (283C) | CUUCUUCCUUAUUGAUGGUTT | 1605 |
| 284 | CCAUCAAUAAGGAAGAAGCCCUU | 1590 | b2a2:304L21 sNA (286C) | GGGCUUCUUCCUUAUUGAUTT | 1606 |
| 280 | CUGACCAUCAAUAAGGAAGAAGC | 1591 | b2a2:300L21 antisense siNA (282C) | UUCUUCCUUAUUGAUGGUCTT | 1607 |
| 288 | CAAUAAGGAAGAAGCCCUUCAGC | 1592 | b2a2:308L21 antisense siNA (290C) | UGAAGGGCUUCUUCCUUAUTT | 1608 |
| 281 | UGACCAUCAAUAAGGAAGAAGCC | 1589 | b2a2:283U21 sense siNA stab4 | B AccAucAAuAAGGAAGAAGTT B | 1609 |
| 284 | CCAUCAAUAAGGAAGAAGCCCUU | 1590 | b2a2:286U21 sense siNA stab4 | B AucAAuAAGGAAGAAGcccTT B | 1610 |
| 280 | CUGACCAUCAAUAAGGAAGAAGC | 1591 | b2a2:282U21 sense siNA stab4 | B GAccAucAAuAAGGAAGAATT B | 1611 |
| 288 | CAAUAAGGAAGAAGCCCUUCAGC | 1592 | b2a2:290U21 sense siNA stab4 | B AuAAGGAAGAAGcccuucATT B | 1612 |
| 281 | UGACCAUCAAUAAGGAAGAAGCC | 1589 | b2a2:301L21 antisense siNA (283C) | cuucuuccuuAuuGAuGGuTsT | 1613 |
| | | | stab5 | | |
| 284 | CCAUCAAUAAGGAAGAAGCCCUU | 1590 | b2a2:304L21 antisense siNA (286C) | GGGcuucuuccuuAuuGAuTsT | 1614 |
| | | | stab5 | | |
| 280 | CUGACCAUCAAUAAGGAAGAAGC | 1591 | b2a2:300L21 antisense siNA (282C) | uucuuccuuAuuGAuGGucTsT | 1615 |
| | | | stab5 | | |
| 288 | CAAUAAGGAAGAAGCCCUUCAGC | 1592 | b2a2:308L21 antisense siNA (290C) | uGAAGGGcuucuuccuuAuTsT | 1616 |
| | | | stab5 | | |
| 281 | UGACCAUCAAUAAGGAAGAAGCC | 1589 | b2a2:283U21 sense siNA stab7 | B AccAucAAuAAGGAAGAAGTT B | 1617 |
| 284 | CCAUCAAUAAGGAAGAAGCCCUU | 1590 | b2a2:286U21 sense siNA stab7 | B AucAAuAAGGAAGAAGcccTT B | 1618 |
| 280 | CUGACCAUCAAUAAGGAAGAAGC | 1591 | b2a2:282U21 sense siNA stab7 | B GAccAucAAuAAGGAAGAATT B | 1619 |
| 288 | CAAUAAGGAAGAAGCCCUUCAGC | 1592 | b2a2:290U21 sense siNA stab7 | B AuAAGGAAGAAGCccuucATT B | 1620 |
| 281 | UGACCAUCAAUAAGGAAGAAGCC | 1589 | b2a2:301L21 antisense siNA (283C) stab11 | cuucuuccuuAuuGAuGGuTsT | 1621 |
| 284 | CCAUCAAUAAGGAAGAAGCCCUU | 1590 | b2a2:304L21 antisense siNA (286C) stab11 | GGGcuucuuccuuAuuGAuTsT | 1622 |
| 280 | CUGACCAUCAAUAAGGAAGAAGC | 1591 | b2a2:300L21 antisense siNA (282C) stab11 | uucuuccuuAuuGAuGGucTsT | 1623 |
| 288 | CAAUAAGGAAGAAGCCCUUCAGC | 1592 | b2a2:308L21 antisense siNA (290C) stab11 | uGAAGGGcuucuuccuuAuTsT | 1624 |
| 354 | UGGAUUUAAGCAGAGUUCAAAAG | 1593 | b3a2:356U21 sense siNA | GAUUUAAGCAGAGUUCAAATT | 1625 |
| 363 | GCAGAGUUCAAAAGCCCUUCAGC | 1594 | b3a2:365U21 sense siNA | AGAGUUCAAAAGCCCUUCATT | 1626 |
| 362 | AGCAGAGUUCAAAAGCCCUUCAG | 1595 | b3a2:364U21 sense siNA | CAGAGUUCAAAAGCCCUUCTT | 1627 |
| 355 | GGAUUUAAGCAGAGUUCAAAAGC | 1596 | b3a2:357U21 sense siNA | AUUUAAGCAGAGUUCAAAATT | 1628 |
| 354 | UGGAUUUAAGCAGAGUUCAAAAG | 1593 | b3a2:374L21 antisense siNA (356C) | UUUGAACUCUGCUUAAAUCTT | 1629 |
| 363 | GCAGAGUUCAAAAGCCCUUCAGC | 1594 | b3a2:383L21 antisense siNA (365C) | UGAAGGGCUUUUGAACUCUTT | 1630 |
| 362 | AGCAGAGUUCAAAAGCCCUUCAG | 1595 | b3a2:382L21 antisense siNA (364C) | GAAGGGCUUUUGAACUCUGTT | 1631 |
| 355 | GGAUUUAAGCAGAGUUCAAAAGC | 1596 | b3a2:375L21 antisense siNA (357C) | UUUUGAACUCUGCUUAAAUTT | 1632 |
| 354 | UGGAUUUAAGCAGAGUUCAAAAG | 1593 | b3a2:356U21 sense siNA stab4 | B GAuuuAAGcAGAGuucAAATT B | 1633 |
| 363 | GCAGAGUUCAAAAGCCCUUCAGC | 1594 | b3a2:365U21 sense siNA stab4 | B AGAGuucAAAAGcccuucATT B | 1634 |
| 362 | AGCAGAGUUCAAAAGCCCUUCAG | 1595 | b3a2:364U21 sense siNA stab4 | B cAGAGuucAAAAGcccuucTT B | 1635 |
| 355 | GGAUUUAAGCAGAGUUCAAAAGC | 1596 | b3a2:357U21 sense siNA stab4 | B AuuuAAGcAGAGuucAAAATT B | 1636 |
| 354 | UGGAUUUAAGCAGAGUUCAAAAG | 1593 | b3a2:374L21 antisense siNA (356C) | uuuGAAcucuGcuuAAAucTsT | 1637 |
| | | | stab5 | | |
| 363 | GCAGAGUUCAAAAGCCCUUCAGC | 1594 | b3a2:383L21 antisense siNA (365C) | uGAAGGGcuuuuGAAcucuTsT | 1638 |
| | | | stab5 | | |
| 362 | AGCAGAGUUCAAAAGCCCUUCAG | 1595 | b3a2:382L21 antisense siNA (364C) | GAAGGGcuuuuGAAcucuGTsT | 1639 |
| | | | stab5 | | |
| 355 | GGAUUUAAGCAGAGUUCAAAAGC | 1596 | b3a2:375L21 antisense siNA (357C) | uuuuGAAcucuGcuuAAAuTsT | 1640 |
| | | | stab5 | | |
| 354 | UGGAUUUAAGCAGAGUUCAAAAG | 1593 | b3a2:356U21 sense siNA stab7 | B GAuuuAAGcAGAGuucAAATT B | 1641 |
| 363 | GCAGAGUUCAAAAGCCCUUCAGC | 1594 | b3a2:365U21 sense siNA stab7 | B AGAGuucAAAAGcccuucATT B | 1642 |
| 362 | AGCAGAGUUCAAAAGCCCUUCAG | 1595 | b3a2:364U21 sense siNA stab7 | B cAGAGuucAAAAGcccuucTT B | 1643 |
| 355 | GGAUUUAAGCAGAGUUCAAAAGC | 1596 | b3a2:357U21 sense siNA stab7 | B AuuuAAGcAGAGuucAAAATT B | 1644 |
| 354 | UGGAUUUAAGCAGAGUUCAAAAG | 1593 | b3a2:374L21 antisense siNA (356C) | uuuGAAcucuGcuuAAAucTsT | 1645 |
| | | | stab11 | | |
| 363 | GCAGAGUUCAAAAGCCCUUCAGC | 1594 | b3a2:383L21 antisense siNA (365C) | uGAAGGGcuuuuGAAcucuTsT | 1646 |
| | | | stab11 | | |
| 362 | AGCAGAGUUCAAAAGCCCUUCAG | 1595 | b3a2:382L21 antisense siNA (364C) | GAAGGGcuuuuGAAcucuGTsT | 1647 |
| | | | stab11 | | |
| 355 | GGAUUUAAGCAGAGUUCAAAAGC | 1596 | b3a2:375L21 antisense siNA (357C) | uuuuGAAcucuGcuuAAAuTsT | 1648 |
| | | | stab11 | | |

ERG

| Target | | Seq | Cmpd | | | Seq |
|---|---|---|---|---|---|---|
| Pos | Target | ID | # | Aliases | Sequence | ID |
| 242 | AGGUGAAUGGCUCAAGGAACUCU | 1597 | 31045 | ERG2:244U21 sense siNA | GUGAAUGGCUCAAGGAACUTT | 1649 |
| 311 | CAGACACCGUUGGGAUGAACUAC | 1695 | | ERG2:313U21 sense siNA | GACACCGUUGGGAUGAACUTT | 1699 |
| 464 | AAGAAUAUGGCCUUCCAGACGUC | 1696 | | ERG2:466U21 sense siNA | GAAUAUGGCCUUCCAGACGTT | 1700 |
| 517 | AAGGAACUGUGCAAGAUGACCAA | 1598 | 31046 | ERG2:519U21 sense siNA | GGAACUGUGCAAGAUGACCTT | 1650 |
| 652 | GCCUUACAAAACUCUCCACGGUU | 1697 | | ERG2:654U21 sense siNA | CUUACAAAACUCUCCACGGTT | 1701 |
| 759 | GAAAGCUGCUCAACCAUCUCCUU | 1599 | 31047 | ERG2:761U21 sense siNA | AAGCUGCUCAACCAUCUCCTT | 1651 |
| 767 | CUCAACCAUCUCCUUCCACAGUG | 1600 | 31048 | ERG2:769U21 sense siNA | CAACCAUCUCCUUCCACAGTT | 1652 |
| 1218 | CCACCCACAGAAGAUGAACUUUG | 1698 | | ERG2:1220U21 sense siNA | ACCCACAGAAGAUGAACUUTT | 1702 |
| 242 | AGGUGAAUGGCUCAAGGAACUCU | 1597 | 31121 | ERG2:262L21 antisense siNA | AGUUCCUUGAGCCAUUCACTT | 1653 |
| | | | | (244C) | | |
| 311 | CAGACACCGUUGGGAUGAACUAC | 1695 | | ERG2:331L21 antisense siNA | AGUUCAUCCCAACGGUGUCTT | 1703 |
| | | | | (313C) | | |
| 464 | AAGAAUAUGGCCUUCCAGACGUC | 1696 | | ERG2:484L21 antisense siNA | CGUCUGGAAGGCCAUAUUCTT | 1704 |
| | | | | (466C) | | |
| 517 | AAGGAACUGUGCAAGAUGACCAA | 1598 | 31122 | ERG2:537L21 antisense siNA | GGUCAUCUUGCACAGUUCCTT | 1654 |
| | | | | (519C) | | |
| 652 | GCCUUACAAAACUCUCCACGGUU | 1697 | | ERG2:672L21 antisense siNA | CCGUGGAGAGUUUUGUAAGTT | 1705 |
| | | | | (654C) | | |
| 759 | GAAAGCUGCUCAACCAUCUCCUU | 1599 | 31123 | ERG2:779L21 antisense siNA | GGAGAUGGUUGAGCAGCUUTT | 1655 |
| | | | | (761C) | | |
| 767 | CUCAACCAUCUCCUUCCACAGUG | 1600 | 31124 | ERG2:787L21 antisense siNA | CUGUGGAAGGAGAUGGUUGTT | 1656 |
| | | | | (769C) | | |
| 1218 | CCACCCACAGAAGAUGAACUUUG | 1698 | | ERG2:1238L21 antisense siNA | AAGUUCAUCUUCUGUGGGUTT | 1706 |
| | | | | (1220C) | | |
| 242 | AGGUGAAUGGCUCAAGGAACUCU | 1597 | 30761 | ERG2:244U21 sense siNA stab04 | B GuGAAuGGcucAAGGAAcuTT B | 1657 |
| 311 | CAGACACCGUUGGGAUGAACUAC | 1695 | | ERG2:313U21 sense siNA stab04 | B GAcAccGuuGGGAuGAAcuTT B | 1707 |
| 464 | AAGAAUAUGGCCUUCCAGACGUC | 1696 | | ERG2:466U21 sense siNA stab04 | B GAAuAuGGccuuccAGAcGTT B | 1708 |
| 517 | AAGGAACUGUGCAAGAUGACCAA | 1598 | 30762 | ERG2:519U21 sense siNA stab04 | B GGAAcuGuGcAAGAuGAcCTT B | 1658 |
| 652 | GCCUUACAAAACUCUCCACGGUU | 1697 | | ERG2:654U21 sense siNA stab04 | B cuuAcAAAAcucuccAcGGTT B | 1709 |
| 759 | GAAAGCUGCUCAACCAUCUCCUU | 1599 | 30763 | ERG2:761U21 sense siNA stab04 | B AAGcuGcucAAccAucuccTT B | 1659 |
| 767 | CUCAACCAUCUCCUUCCACAGUG | 1600 | 30764 | ERG2:769U21 sense siNA stab04 | B cAAccAucuccuuccAcAGTT B | 1660 |
| 1218 | CCACCCACAGAAGAUGAACUUUG | 1698 | | ERG2:1220U21 sense siNA | B AcccAcAGAAGAuGAAcuuTT B | 1710 |
| | | | | stab04 | | |
| 242 | AGGUGAAUGGCUCAAGGAACUCU | 1597 | 30765 | ERG2:262L21 antisense siNA | AGuuccuuGAGccAuucAcTsT | 1661 |
| | | | | (244C) stab05 | | |
| 311 | CAGACACCGUUGGGAUGAACUAC | 1695 | | ERG2:331L21 antisense siNA | AGuucAucccAAcGGuGucTsT | 1711 |
| | | | | (313C) stab05 | | |
| 464 | AAGAAUAUGGCCUUCCAGACGUC | 1696 | | ERG2:484L21 antisense siNA | cGucuGGAAGGccAuAuucTsT | 1712 |
| | | | | (466C) stab05 | | |
| 517 | AAGGAACUGUGCAAGAUGACCAA | 1598 | 30766 | ERG2:537L21 antisense siNA | GGucAucuuGcAcAGuuccTsT | 1662 |
| | | | | (519C) stab05 | | |
| 652 | GCCUUACAAAACUCUCCACGGUU | 1697 | | ERG2:672L21 antisense siNA | ccGuGGAGAGuuuuGuAAGTsT | 1713 |
| | | | | (654C) stab05 | | |
| 759 | GAAAGCUGCUCAACCAUCUCCUU | 1599 | 30767 | ERG2:779L21 antisense siNA | GGAGAuGGuuGAGcAGcuuTsT | 1663 |
| | | | | (761C) stab05 | | |
| 767 | CUCAACCAUCUCCUUCCACAGUG | 1600 | 30768 | ERG2:787L21 antisense siNA | cuGuGGAAGGAGAuGGuuGTsT | 1664 |
| | | | | (769C) stab05 | | |
| 1218 | CCACCCACAGAAGAUGAACUUUG | 1698 | | ERG2:1238L21 antisense siNA | AAGuucAucuucuGuGGGuTsT | 1714 |
| | | | | (1220C) stab05 | | |
| 242 | AGGUGAAUGGCUCAAGGAACUCU | 1597 | | ERG2:244U21 sense siNA stab07 | B GuGAAuGGcucAAGGAAcuTT B | 1665 |
| 311 | CAGACACCGUUGGGAUGAACUAC | 1695 | | ERG2:313U21 sense siNA stab07 | B GAcAccGuuGGGAuGAAcuTT B | 1715 |
| 464 | AAGAAUAUGGCCUUCCAGACGUC | 1696 | | ERG2:466U21 sense siNA stab07 | B GAAuAuGGccuuccAGAcGTT B | 1716 |
| 517 | AAGGAACUGUGCAAGAUGACCAA | 1598 | | ERG2:519U21 sense siNA stab07 | B GGAAcuGuGcAAGAuGAccTT B | 1666 |
| 652 | GCCUUACAAAACUCUCCACGGUU | 1697 | | ERG2:654U21 sense siNA stab07 | B cuuAcAAAAcucuccAcGGTT B | 1717 |
| 759 | GAAAGCUGCUCAACCAUCUCCUU | 1599 | | ERG2:761U21 sense siNA stab07 | B AAGcuGcucAAccAucuccTT B | 1667 |
| 767 | CUCAACCAUCUCCUUCCACAGUG | 1600 | | ERG2:769U21 sense siNA stab07 | B cAAccAucuccuuccAcAGTT B | 1668 |
| 1218 | CCACCCACAGAAGAUGAACUUUG | 1698 | | ERG2:1220U21 sense siNA | B AcccAcAGAAGAuGAAcuuTT B | 1718 |
| | | | | stab07 | | |
| 242 | AGGUGAAUGGCUCAAGGAACUCU | 1597 | | ERG2:262L21 antisense siNA | AGuuccuuGAGccAuucAcTsT | 1669 |
| | | | | (244C) stab11 | | |
| 311 | CAGACACCGUUGGGAUGAACUAC | 1695 | | ERG2:331L21 antisense siNA | AGuucAucccAAcGGuGucTsT | 1719 |
| | | | | (313C) stab11 | | |
| 464 | AAGAAUAUGGCCUUCCAGACGUC | 1696 | | ERG2:484L21 antisense siNA | cGucuGGAAGGccAuAuucTsT | 1720 |
| | | | | (466C) stab11 | | |
| 517 | AAGGAACUGUGCAAGAUGACCAA | 1598 | | ERG2:537L21 antisense siNA | GGucAucuuGcAcAGuuccTsT | 1670 |
| | | | | (519C) stab11 | | |
| 652 | GCCUUACAAAACUCUCCACGGUU | 1697 | | ERG2:672L21 antisense siNA | ccGuGGAGAGuuuuGuAAGTsT | 1721 |
| | | | | (654C) stab11 | | |
| 759 | GAAAGCUGCUCAACCAUCUCCUU | 1599 | | ERG2:779L21 antisense siNA | GGAGAuGGuuGAGcAGcuuTsT | 1671 |
| | | | | (761C) stab11 | | |
| 767 | CUCAACCAUCUCCUUCCACAGUG | 1600 | | ERG2:787L21 antisense siNA | cuGuGGAAGGAGAuGGuuGTsT | 1672 |
| | | | | (769C) stab11 | | |
| 1218 | CCACCCACAGAAGAUGAACUUUG | 1698 | | ERG2:1238L21 antisense siNA | AAGuucAucuucuGuGGGuTsT | 1722 |
| | | | | (1220C) stab11 | | |
| 242 | AGGUGAAUGGCUCAAGGAACUCU | 1597 | | ERG2:244U21 sense siNA stab18 | B GuGAAuGGcucAAGGAAcuTT B | 1723 |
| 311 | CAGACACCGUUGGGAUGAACUAC | 1695 | | ERG2:313U21 sense siNA stab18 | B GAcAccGuuGGGAuGAAcuTT B | 1724 |
| 464 | AAGAAUAUGGCCUUCCAGACGUC | 1696 | | ERG2:466U21 sense siNA stab18 | B GAAuAuGGccuuccAGAcGTT B | 1725 |
| 517 | AAGGAACUGUGCAAGAUGACCAA | 1598 | | ERG2:519U21 sense siNA stab18 | B GGAAcuGuGcAAGAuGAccTT B | 1726 |
| 652 | GCCUUACAAAACUCUCCACGGUU | 1697 | | ERG2:654U21 sense siNA stab18 | B cuuAcAAAAcucuccAcGGTT B | 1727 |
| 759 | GAAAGCUGCUCAACCAUCUCCUU | 1599 | | ERG2:761U21 sense siNA stab18 | B AAGcuGcucAAccAucuccTT B | 1728 |
| 767 | CUCAACCAUCUCCUUCCACAGUG | 1600 | | ERG2:769U21 sense siNA stab18 | B cAAccAucuccuuccAcAGTT B | 1729 |
| 1218 | CCACCCACAGAAGAUGAACUUUG | 1698 | | ERG2:1220U21 sense siNA | B AccCAcAGAAGAuGAAcuuTT B | 1730 |
| | | | | stab18 | | |
| 242 | AGGUGAAUGGCUCAAGGAACUCU | 1597 | | ERG2:262L21 antisense siNA | AGuuccuuGAGccAuucAcTsT | 1731 |
| | | | | (244C) stab08 | | |
| 311 | CAGACACCGUUGGGAUGAACUAC | 1695 | | ERG2:331L21 antisense siNA | AGuucAucccAAcGGuGucTsT | 1732 |
| | | | | (313C) stab08 | | |
| 464 | AAGAAUAUGGCCUUCCAGACGUC | 1696 | | ERG2:484L21 antisense siNA | cGucuGGAAGGccAuAuucTsT | 1733 |
| | | | | (466C) stab08 | | |
| 517 | AAGGAACUGUGCAAGAUGACCAA | 1598 | | ERG2:537L21 antisense siNA | GGucAucuuGcAcAGuuccTsT | 1734 |
| | | | | (519C) stab08 | | |
| 652 | GCCUUACAAAACUCUCCACGGUU | 1697 | | ERG2:672L21 antisense siNA | ccGuGGAGAGuuuuGuAAGTsT | 1735 |
| | | | | (654C) stab08 | | |
| 759 | GAAAGCUGCUCAACCAUCUCCUU | 1599 | | ERG2:779L21 antisense siNA | GGAGAuGGuuGAGcAGcuuTsT | 1736 |
| | | | | (761C) stab08 | | |
| 767 | CUCAACCAUCUCCUUCCACAGUG | 1600 | | ERG2:787L21 antisense siNA | cuGuGGAAGGAGAuGGuuGTsT | 1737 |
| | | | | (769C) stab08 | | |
| 1218 | CCACCCACAGAAGAUGAACUUUG | 1698 | | ERG2:1238121 antisense siNA | AAGuucAucuucuGuGGGuTsT | 1738 |
| | | | | (1220C) stab08 | | |
| 242 | AGGUGAAUGGCUCAAGGAACUCU | 1597 | 36777 | ERG2:244U21 sense siNA stab09 | B GUGAAUGGCUCAAGGAACUTT B | 1739 |
| 311 | CAGACACCGUUGGGAUGAACUAC | 1695 | 36778 | ERG2:313U21 sense siNA stab09 | B GACACCGUUGGGAUGAACUTT B | 1740 |
| 464 | AAGAAUAUGGCCUUCCAGACGUC | 1696 | 36779 | ERG2:466U21 sense siNA stab09 | B GAAUAUGGCCUUCCAGACGTT B | 1741 |
| 517 | AAGGAACUGUGCAAGAUGACCAA | 1598 | 36780 | ERG2:519U21 sense siNA stab09 | B GGAACUGUGCAAGAUGACCTT B | 1742 |
| 652 | GCCUUACAAAACUCUCCACGGUU | 1697 | 36781 | ERG2:654U21 sense siNA stab09 | B CUUACAAAACUCUCCACGGTT B | 1743 |
| 759 | GAAAGCUGCUCAACCAUCUCCUU | 1599 | 36782 | ERG2:761U21 sense siNA stab09 | B AAGCUGCUCAACCAUCUCCTT B | 1744 |
| 767 | CUCAACCAUCUCCUUCCACAGUG | 1600 | 36783 | ERG2:769U21 sense siNA stab09 | B CAACCAUCUCCUUCCACAGTT B | 1745 |
| 1218 | CCACCCACAGAAGAUGAACUUUG | 1698 | 36784 | ERG2:1220U21 sense siNA | B ACCCACAGAAGAUGAACUUTT B | 1746 |
| | | | | stab09 | | |
| 242 | AGGUGAAUGGCUCAAGGAACUCU | 1597 | | ERG2:262L21 antisense siNA | AGUUCCUUGAGCCAUUCACTsT | 1747 |
| | | | | (244C) stab10 | | |
| 311 | CAGACACCGUUGGGAUGAACUAC | 1695 | | ERG2:331L21 antisense siNA | AGUUCAUCCCAACGGUGUCTsT | 1748 |
| | | | | (313C) stab10 | | |
| 464 | AAGAAUAUGGCCUUCCAGACGUC | 1696 | | ERG2:484L21 antisense siNA | CGUCUGGAAGGCCAUAUUCTsT | 1749 |
| | | | | (466C) stab10 | | |
| 517 | AAGGAACUGUGCAAGAUGACCAA | 1598 | | ERG2:537L21 antisense siNA | GGUCAUCUUGCACAGUUCCTsT | 1750 |
| | | | | (519C) stab10 | | |
| 652 | GCCUUACAAAACUCUCCACGGUU | 1697 | | ERG2:672L21 antisense siNA | CCGUGGAGAGUUUUGUAAGTsT | 1751 |
| | | | | (654C) stab10 | | |
| 759 | GAAAGCUGCUCAACCAUCUCCUU | 1599 | | ERG2:779L21 antisense siNA | GGAGAUGGUUGAGCAGCUUTsT | 1752 |
| | | | | (761C) stab10 | | |
| 767 | CUCAACCAUCUCCUUCCACAGUG | 1600 | | ERG2:787L21 antisense siNA | CUGUGGAAGGAGAUGGUUGTsT | 1753 |
| | | | | (769C) stab10 | | |
| 1218 | CCACCCACAGAAGAUGAACUUUG | 1698 | | ERG2:1238L21 antisense siNA | AAGUUCAUCUUCUGUGGGUTsT | 1754 |
| | | | | (1220C) stab10 | | |
| 242 | AGGUGAAUGGCUCAAGGAACUCU | 1597 | 36785 | ERG2:262L21 antisense siNA | AGuuccuuGAGccAuucAcTT B | 1755 |
| | | | | (244C) stab19 | | |
| 311 | CAGACACCGUUGGGAUGAACUAC | 1695 | 36786 | ERG2:331L21 antisense siNA | AGuucAucccAAcGGuGucTT B | 1756 |
| | | | | (313C) stab19 | | |
| 464 | AAGAAUAUGGCCUUCCAGACGUC | 1696 | 36787 | ERG2:484L21 antisense siNA | cGucuGGAAGGccAuAuucTT B | 1757 |
| | | | | (466C) stab19 | | |
| 517 | AAGGAACUGUGCAAGAUGACCAA | 1598 | 36788 | ERG2:537L21 antisense siNA | GGucAucuuGcAcAGuuccTT B | 1758 |
| | | | | (519C) stab19 | | |
| 652 | GCCUUACAAAACUCUCCACGGUU | 1697 | 36789 | ERG2:672L21 antisense siNA | ccGuGGAGAGuuuuGuAAGTT B | 1759 |
| | | | | (654C) stab19 | | |
| 759 | GAAAGCUGCUCAACCAUCUCCUU | 1599 | 36790 | ERG2:779L21 antisense siNA | GGAGAuGGuuGAGcAGcuuTT B | 1760 |
| | | | | (761C) stab19 | | |
| 767 | CUCAACCAUCUCCUUCCACAGUG | 1600 | 36791 | ERG2:787L21 antisense siNA | cuGuGGAAGGAGAuGGuuGTT B | 1761 |
| | | | | (769C) stab19 | | |
| 1218 | CCACCCACAGAAGAUGAACUUUG | 1698 | 36792 | ERG2:1238L21 antisense siNA | AAGuucAucuucuGuGGGuTT B | 1762 |
| | | | | (1220C) stab19 | | |
| 242 | AGGUGAAUGGCUCAAGGAACUCU | 1597 | 36793 | ERG2:262L21 antisense siNA | AGUUCCUUGAGCCAUUCACTT B | 1763 |
| | | | | (244C) stab22 | | |
| 311 | CAGACACCGUUGGGAUGAACUAC | 1695 | 36794 | ERG2:331L21 antisense siNA | AGUUCAUCCCAACGGUGUCTT B | 1764 |
| | | | | (313C) stab22 | | |
| 464 | AAGAAUAUGGCCUUCCAGACGUC | 1696 | 36795 | ERG2:484L21 antisense siNA | CGUCUGGAAGGCCAUAUUCTT B | 1765 |
| | | | | (466C) stab22 | | |
| 517 | AAGGAACUGUGCAAGAUGACCAA | 1598 | 36796 | ERG2:537L21 antisense siNA | GGUCAUCUUGCACAGUUCCTT B | 1766 |
| | | | | (519C) stab22 | | |
| 652 | GCCUUACAAAACUCUCCACGGUU | 1697 | 36797 | ERG2:672L21 antisense siNA | CCGUGGAGAGUUUUGUAAGTT B | 1767 |
| | | | | (654C) stab22 | | |
| 759 | GAAAGCUGCUCAACCAUCUCCUU | 1599 | 36798 | ERG2:779L21 antisense siNA | GGAGAUGGUUGAGCAGCUUTT B | 1768 |
| | | | | (761C) stab22 | | |
| 767 | CUCAACCAUCUCCUUCCACAGUG | 1600 | 36799 | ERG2:787L21 antisense siNA | CUGUGGAAGGAGAUGGUUGTT B | 1769 |
| | | | | (769C) stab22 | | |
| 1218 | CCACCCACAGAAGAUGAACUUUG | 1698 | 36800 | ERG2:1238L21 antisense siNA | AAGUUCAUCUUCUGUGGGUTT B | 1770 |
| | | | | (1220C) stab22 | | |

B2A2

| Tar- | | | | | |
|---|---|---|---|---|---|
| get | | Seq | | | Seq |
| Pos | Target | ID | Aliases | Sequence | ID |
| 281 | UGACCAUCAAUAAGGAAGAAGCC | 1589 | b2a2:283U21 sense siNA | ACCAUCAAUAAGGAAGAAGTT | 1601 |
| 284 | CCAUCAAUAAGGAAGAAGCCCUU | 1590 | b2a2:286U21 sense siNA | AUCAAUAAGGAAGAAGCCCTT | 1602 |
| 280 | CUGACCAUCAAUAAGGAAGAAGC | 1591 | b2a2:282U21 sense siNA | GACCAUCAAUAAGGAAGAATT | 1603 |
| 288 | CAAUAAGGAAGAAGCCCUUCAGC | 1592 | b2a2:290U21 sense siNA | AUAAGGAAGAAGCCCUUCATT | 1604 |
| 281 | UGACCAUCAAUAAGGAAGAAGCC | 1589 | b2a2:301L21 antisense siNA (283C) | CUUCUUCCUUAUUGAUGGUTT | 1605 |
| 284 | CCAUCAAUAAGGAAGAAGCCCUU | 1590 | b2a2:304L21 antisense siNA (286C) | GGGCUUCUUCCUUAUUGAUTT | 1606 |
| 280 | CUGACCAUCAAUAAGGAAGAAGC | 1591 | b2a2:300L21 antisense siNA (282C) | UUCUUCCUUAUUGAUGGUCTT | 1607 |
| 288 | CAAUAAGGAAGAAGCCCUUCAGC | 1592 | b2a2:308L21 antisense siNA (290C) | UGAAGGGCUUCUUCCUUAUTT | 1608 |
| 281 | UGACCAUCAAUAAGGAAGAAGCC | 1589 | b2a2:283U21 sense siNA stab4 | B AccAucAAuAAGGAAGAAGTT B | 1609 |
| 284 | CCAUCAAUAAGGAAGAAGCCCUU | 1590 | b2a2:286U21 sense siNA stab4 | B AucAAuAAGGAAGAAGcccTT B | 1610 |
| 280 | CUGACCAUCAAUAAGGAAGAAGC | 1591 | b2a2:282U21 sense siNA stab4 | B GAccAucAAuAAGGAAGAATT B | 1611 |
| 288 | CAAUAAGGAAGAAGCCCUUCAGC | 1592 | b2a2:290U21 sense siNA stab4 | B AuAAGGAAGAAGcccuucATT B | 1612 |
| 281 | UGACCAUCAAUAAGGAAGAAGCC | 1589 | b2a2:301L21 antisense siNA (283C) | cuucuuccuuAuuGAuGGuTsT | 1613 |
| | | | stab5 | | |
| 284 | CCAUCAAUAAGGAAGAAGCCCUU | 1590 | b2a2:304L21 antisense siNA (286C) | GGGcuucuuccuuAuuGAuTsT | 1614 |
| | | | stab5 | | |
| 280 | CUGACCAUCAAUAAGGAAGAAGC | 1591 | b2a2:300L21 antisense siNA (282C) | uucuuccuuAuuGAuGGucTsT | 1615 |
| | | | stab5 | | |
| 288 | CAAUAAGGAAGAAGCCCUUCAGC | 1592 | b2a2:308L21 antisense siNA (290C) | uGAAGGGcuucuuccuuAuTsT | 1616 |
| | | | stab5 | | |
| 281 | UGACCAUCAAUAAGGAAGAAGCC | 1589 | b2a2:283U21 sense siNA stab7 | B AccAucAAuAAGGAAGAAGTT B | 1617 |
| 284 | CCAUCAAUAAGGAAGAAGCCCUU | 1590 | b2a2:286U21 sense siNA stab7 | B AucAAuAAGGAAGAAGcCcTT B | 1618 |
| 280 | CUGACCAUCAAUAAGGAAGAAGC | 1591 | b2a2:282U21 sense siNA stab7 | B GAccAucAAuAAGGAAGAATT B | 1619 |
| 288 | CAAUAAGGAAGAAGCCCUUCAGC | 1592 | b2a2:290U21 sense siNA stab7 | B AuAAGGAAGAAGcccuucATT B | 1620 |
| 281 | UGACCAUCAAUAAGGAAGAAGCC | 1589 | b2a2:301L21 antisense siNA (283C) | cuucuuccuuAuuGAuGGuTsT | 1621 |
| | | | stab11 | | |
| 284 | CCAUCAAUAAGGAAGAAGCCCUU | 1590 | b2a2:304L21 antisense siNA (286C) | GGGcuucuuccuuAuuGAuTsT | 1622 |
| | | | stab11 | | |
| 280 | CUGACCAUCAAUAAGGAAGAAGC | 1591 | b2a2:300L21 antisense siNA (282C) | uucuuccuuAuuGAuGGucTsT | 1623 |
| | | | stab11 | | |
| 288 | CAAUAAGGAAGAAGCCCUUCAGC | 1592 | b2a2:308L21 antisense siNA (290C) | uGAAGGGcuucuuccuuAuTsT | 1624 |
| | | | stab11 | | |
| 354 | UGGAUUUAAGCAGAGUUCAAAAG | 1593 | b3a2:356U21 sense siNA | GAUUUAAGCAGAGUUCAAATT | 1625 |
| 363 | GCAGAGUUCAAAAGCCCUUCAGC | 1594 | b3a2:365U21 sense siNA | AGAGUUCAAAAGCCCUUCATT | 1626 |
| 362 | AGCAGAGUUCAAAAGCCCUUCAG | 1595 | b3a2:364U21 sense siNA | CAGAGUUCAAAAGCCCUUCTT | 1627 |
| 355 | GGAUUUAAGCAGAGUUCAAAAGC | 1596 | b3a2:357U21 sense siNA | AUUUAAGCAGAGUUCAAAATT | 1628 |
| 354 | UGGAUUUAAGCAGAGUUCAAAAG | 1593 | b3a2:374L21 antisense siNA (356C) | UUUGAACUCUGCUUAAAUCTT | 1629 |
| 363 | GCAGAGUUCAAAAGCCCUUCAGC | 1594 | b3a2:383L21 antisense siNA (365C) | UGAAGGGCUUUUGAACUCUTT | 1630 |
| 362 | AGCAGAGUUCAAAAGCCCUUCAG | 1595 | b3a2:382L21 antisense siNA (364C) | GAAGGGCUUUUGAACUCUGTT | 1631 |
| 355 | GGAUUUAAGCAGAGUUCAAAAGC | 1596 | b3a2:375L21 antisense siNA (357C) | UUUUGAACUCUGCUUAAAUTT | 1632 |
| 354 | UGGAUUUAAGCAGAGUUCAAAAG | 1593 | b3a2:356U21 sense siNA stab4 | B GAuuuAAGcAGAGuucAAATT B | 1633 |
| 363 | GCAGAGUUCAAAAGCCCUUCAGC | 1594 | b3a2:365U21 sense siNA stab4 | B AGAGuucAAAAGcccuucATT B | 1634 |
| 362 | AGCAGAGUUCAAAAGCCCUUCAG | 1595 | b3a2:364U21 sense siNA stab4 | B cAGAGuucAAAAGcccuucTT B | 1635 |
| 355 | GGAUUUAAGCAGAGUUCAAAAGC | 1596 | b3a2:357U21 sense siNA stab4 | B AuuuAAGcAGAGuucAAAATT B | 1636 |
| 354 | UGGAUUUAAGCAGAGUUCAAAAG | 1593 | b3a2:374L21 antisense siNA (356C) | uuuGAAcucuGcuuAAAucTsT | 1637 |
| | | | stab5 | | |
| 363 | GCAGAGUUCAAAAGCCCUUCAGC | 1594 | b3a2:383L21 antisense siNA (365C) | uGAAGGGcuuuuGAAcucuTsT | 1638 |
| | | | stab5 | | |
| 362 | AGCAGAGUUCAAAAGCCCUUCAG | 1595 | b3a2:382L21 antisense siNA (364C) | GAAGGGcuuuuGAAcucuGTsT | 1639 |
| | | | stab5 | | |
| 355 | GGAUUUAAGCAGAGUUCAAAAGC | 1596 | b3a2:375L21 antisense siNA (357C) | uuuuGAAcucuGcuuAAAuTsT | 1640 |
| | | | stab5 | | |
| 354 | UGGAUUUAAGCAGAGUUCAAAAG | 1593 | b3a2:356U21 sense siNA stab7 | B GAuuuAAGcAGAGuucAAATT B | 1641 |
| 363 | GCAGAGUUCAAAAGCCCUUCAGC | 1594 | b3a2:365U21 sense siNA stab7 | B AGAGuucAAAAGcccuucATT B | 1642 |
| 362 | AGCAGAGUUCAAAAGCCCUUCAG | 1595 | b3a2:364U21 sense siNA stab7 | B cAGAGuucAAAAGcccuucTT B | 1643 |
| 355 | GGAUUUAAGCAGAGUUCAAAAGC | 1596 | b3a2:357U21 sense siNA stab7 | B AuuuAAGcAGAGuucAAAATT B | 1644 |
| 354 | UGGAUUUAAGCAGAGUUCAAAAG | 1593 | b3a2:374L21 antisense siNA (356C) | uuuGAAcucuGcuuAAAucTsT | 1645 |
| | | | stab11 | | |
| 363 | GCAGAGUUCAAAAGCCCUUCAGC | 1594 | b3a2:383L21 antisense siNA (365C) | uGAAGGGcuuuuGAAcucuTsT | 1646 |
| | | | stab11 | | |
| 362 | AGCAGAGUUCAAAAGCCCUUCAG | 1595 | b3a2:382L21 antisense siNA (364C) | GAAGGGcuuuuGAAcucuGTsT | 1647 |
| | | | stab11 | | |
| 355 | GGAUUUAAGCAGAGUUCAAAAGC | 1596 | b3a2:375L21 antisense siNA (357C) | uuuuGAAcucuGcuuAAAuTsT | 1648 |
| | | | stab11 | | |

Uppercase = ribonucleotide
u, c = 2′-deoxy-2′-fluoro U, C
T = deoxy T
B = inverted deoxy abasic
s = phosphorothioate linkage
A = deoxy Adenosine
G = deoxy Guanosine
A = 2′-O-Methyl Adenosine
G = 2′-O-Methyl Guanosine

[0441] TABLE IV
Non-limiting examples of Stabilization Chemistries for chemically
modified siNA constructs

| Chemistry | pyrimidine | Purine | cap | p = S | Strand |
|---|---|---|---|---|---|
| “Stab 00” | Ribo | Ribo | TT at 3′- | | S/AS |
| | | | ends | | |
| “Stab 1” | Ribo | Ribo | — | 5 at 5′-end | S/AS |
| | | | | 1 at 3′-end | |
| “Stab 2” | Ribo | Ribo | — | All | Usually AS |
| | | | | linkages | |
| “Stab 3” | 2′-fluoro | Ribo | — | 4 at 5′-end | Usually S |
| | | | | 4 at 3′-end | |
| “Stab 4” | 2′-fluoro | Ribo | 5′ and 3′- | — | Usually S |
| | | | ends | | |
| “Stab 5” | 2′-fluoro | Ribo | — | 1 at 3′-end | Usually AS |
| “Stab 6” | 2′-O- | Ribo | 5′ and 3′- | — | Usually S |
| | Methyl | | ends | | |
| “Stab 7” | 2′-fluoro | 2′-deoxy | 5′ and 3′- | — | Usually S |
| | | | ends | | |
| “Stab 8” | 2′-fluoro | 2′-O- | — | 1 at 3′-end | S/AS |
| | | Methyl | | | |
| “Stab 9” | Ribo | Ribo | 5′ and 3′- | — | Usually S |
| | | | ends | | |
| “Stab 10” | Ribo | Ribo | — | 1 at 3′-end | Usually AS |
| “Stab 11” | 2′-fluoro | 2′-deoxy | — | 1 at 3′-end | Usually AS |
| “Stab 12” | 2′-fluoro | LNA | 5′ and 3′- | | Usually S |
| | | | ends | | |
| “Stab 13” | 2′-fluoro | LNA | | 1 at 3′-end | Usually AS |
| “Stab 14” | 2′-fluoro | 2′-deoxy | | 2 at 5′-end | Usually AS |
| | | | | 1 at 3′-end | |
| “Stab 15” | 2′-deoxy | 2′-deoxy | | 2 at 5′-end | Usually AS |
| | | | | 1 at 3′-end | |
| “Stab 16” | Ribo | 2′-O- | 5′ and 3′- | | Usually S |
| | | Methyl | ends | | |
| “Stab 17” | 2′-O- | 2′-O- | 5′ and 3′- | | Usually S |
| | Methyl | Methyl | ends | | |
| “Stab 18” | 2′-fluoro | 2′-O- | 5′ and 3′- | | Usually S |
| | | Methyl | ends | | |
| “Stab 19” | 2′-fluoro | 2′-O- | 3′-end | | S/AS |
| | | Methyl | | | |
| “Stab 20” | 2′-fluoro | 2′-deoxy | 3′-end | | Usually AS |
| “Stab 21” | 2′-fluoro | Ribo | 3′-end | | Usually AS |
| “Stab 22” | Ribo | Ribo | 3′-end | | Usually AS |
| “Stab 23” | 2′-fluoro* | 2′-deoxy* | 5′ and 3′- | | Usually S |
| | | | ends | | |
| “Stab 24” | 2′-fluoro* | 2′-O- | — | 1 at 3′-end | S/AS |
| | | Methyl* | | | |
| “Stab 25” | 2′-fluoro* | 2′-O- | — | 1 at 3′-end | S/AS |
| | | Methyl* | | | |
| “Stab 26” | 2′-fluoro* | 2′-O- | — | | S/AS |
| | | Methyl* | | | |
| “Stab 27” | 2′-fluoro* | 2′-O- | 3′-end | | S/AS |
| | | Methyl* | | | |
| “Stab 28” | 2′-fluoro* | 2′-O- | 3′-end | | S/AS |
| | | Methyl* | | | |
| “Stab 29” | 2′-fluoro* | 2′-O- | | 1 at 3′-end | S/AS |
| | | Methyl* | | | |
| “Stab 30” | 2′-fluoro* | 2′-O- | | | S/AS |
| | | Methyl* | | | |
| “Stab 31” | 2′-fluoro* | 2′-O- | 3′-end | | S/AS |
| | | Methyl* | | | |
| “Stab 32” | 2′-fluoro | 2′-O- | | | S/AS |
| | | Methyl | | | |

CAP = any terminal cap, see for example FIG. 10.
All Stab 00-32 chemistries can comprise 3′-terminal thymidine (TT) residues
All Stab 00-32 chemistries typically comprise about 21 nucleotides, but can vary as described herein.
S = sense strand
AS = antisense strand
*Stab 23 has a single ribonucleotide adjacent to 3′-CAP
*Stab 24 and Stab 28 have a single ribonucleotide at 5′-terminus
*Stab 25, Stab 26, and Stab 27 have three ribonucleotides at 5′-terminus
*Stab 29, Stab 30, and Stab 31, any purine at first three nucleotide positions from 5′-terminus are ribonucleotides
p = phosphorothioate linkage

[0442] TABLE V

| | | | | | |
|---|---|---|---|---|---|
| Reagent | Equivalents | Amount | Wait Time* DNA | Wait Time* 2′-O-methyl | Wait Time*RNA |

A. 2.5 μmol Synthesis Cycle ABI 394 Instrument

| | | | | | |
|---|---|---|---|---|---|
| Phosphoramidites | 6.5 | 163 μL | 45 sec | 2.5 min | 7.5 min |
| S-Ethyl Tetrazole | 23.8 | 238 μL | 45 sec | 2.5 min | 7.5 min |
| Acetic Anhydride | 100 | 233 μL | 5 sec | 5 sec | 5 sec |
| N-Methyl | 186 | 233 μL | 5 sec | 5 sec | 5 sec |
| Imidazole | | | | | |
| TCA | 176 | 2.3 mL | 21 sec | 21 sec | 21 sec |
| Iodine | 11.2 | 1.7 mL | 45 sec | 45 sec | 45 sec |
| Beaucage | 12.9 | 645 μL | 100 sec | 300 sec | 300 sec |
| Acetonitrile | NA | 6.67 mL | NA | NA | NA |

B. 0.2 μmol Synthesis Cycle ABI 394 Instrument

| | | | | | |
|---|---|---|---|---|---|
| Phosphoramidites | 15 | 31 μL | 45 sec | 233 sec | 465 sec |
| S-Ethyl Tetrazole | 38.7 | 31 μL | 45 sec | 233 min | 465 sec |
| Acetic Anhydride | 655 | 124 μL | 5 sec | 5 sec | 5 sec |
| N-Methyl | 1245 | 124 μL | 5 sec | 5 sec | 5 sec |
| Imidazole | | | | | |
| TCA | 700 | 732 μL | 10 sec | 10 sec | 10 sec |
| Iodine | 20.6 | 244 μL | 15 sec | 15 sec | 15 sec |
| Beaucage | 7.7 | 232 μL | 100 sec | 300 sec | 300 sec |
| Acetonitrile | NA | 2.64 mL | NA | NA | NA |

C. 0.2 μmol Synthesis Cycle 96 well Instrument

| | Equivalents: DNA/ | Amount: DNA/2′-O- | | Wait Time* 2′-O- | |
|---|---|---|---|---|---|
| Reagent | 2′-O-methyl/Ribo | methyl/Ribo | Wait Time* DNA | methyl | Wait Time* Ribo |
| Phosphoramidites | 22/33/66 | 40/60/120 μL | 60 sec | 180 sec | 360 sec |
| S-Ethyl Tetrazole | 70/105/210 | 40/60/120 μL | 60 sec | 180 min | 360 sec |
| Acetic Anhydride | 265/265/265 | 50/50/50 μL | 10 sec | 10 sec | 10 sec |
| N-Methyl | 502/502/502 | 50/50/50 μL | 10 sec | 10 sec | 10 sec |
| Imidazole | | | | | |
| TCA | 238/475/475 | 250/500/500 μL | 15 sec | 15 sec | 15 sec |
| Iodine | 6.8/6.8/6.8 | 80/80/80 μL | 30 sec | 30 sec | 30 sec |
| Beaucage | 34/51/51 | 80/120/120 | 100 sec | 200 sec | 200 sec |
| Acetonitrile | NA | 1150/1150/1150 μL | NA | NA | NA |

*Wait time does not include contact time during delivery.
*Tandem synthesis utilizes double coupling of linker molecule

The application's sequence listing, which the Patent Office published only in electronic form, follows.

SEQUENCE LISTING (1779 sequences)

SEQ ID NO: 1 - RNA, 19 nt, Artificial Sequence
  Description of Artificial Sequence:  Target Sequence/siNA sense region
ggagauagguaggaguagc

SEQ ID NO: 2 - RNA, 19 nt, Artificial Sequence
  Description of Artificial Sequence:  Target Sequence/siNA sense region
cgugguaagggcgaugagu

SEQ ID NO: 3 - RNA, 19 nt, Artificial Sequence
  Description of Artificial Sequence:  Target Sequence/siNA sense region
ugugggccgggcgggagug

SEQ ID NO: 4 - RNA, 19 nt, Artificial Sequence
  Description of Artificial Sequence:  Target Sequence/siNA sense region
gcggcgagagccggcuggc

SEQ ID NO: 5 - RNA, 19 nt, Artificial Sequence
  Description of Artificial Sequence:  Target Sequence/siNA sense region
cugagcuuagcguccgagg

SEQ ID NO: 6 - RNA, 19 nt, Artificial Sequence
  Description of Artificial Sequence:  Target Sequence/siNA sense region
gaggcggcggcggcggcgg

SEQ ID NO: 7 - RNA, 19 nt, Artificial Sequence
  Description of Artificial Sequence:  Target Sequence/siNA sense region
gcggcagcggcggcggcgg

SEQ ID NO: 8 - RNA, 19 nt, Artificial Sequence
  Description of Artificial Sequence:  Target Sequence/siNA sense region
gggcuguggggcggugcgg

SEQ ID NO: 9 - RNA, 19 nt, Artificial Sequence
  Description of Artificial Sequence:  Target Sequence/siNA sense region
gaagcgagaggcgaggagc

SEQ ID NO: 10 - RNA, 19 nt, Artificial Sequence
  Description of Artificial Sequence:  Target Sequence/siNA sense region
cgcgcgggccguggccaga

SEQ ID NO: 11 - RNA, 19 nt, Artificial Sequence
  Description of Artificial Sequence:  Target Sequence/siNA sense region
agucuggcggcggccuggc

SEQ ID NO: 12 - RNA, 19 nt, Artificial Sequence
  Description of Artificial Sequence:  Target Sequence/siNA sense region
cggagcggagagcagcgcc

SEQ ID NO: 13 - RNA, 19 nt, Artificial Sequence
  Description of Artificial Sequence:  Target Sequence/siNA sense region
ccgcgccucgccgugcgga

SEQ ID NO: 14 - RNA, 19 nt, Artificial Sequence
  Description of Artificial Sequence:  Target Sequence/siNA sense region
aggagccccgcacacaaua

SEQ ID NO: 15 - RNA, 19 nt, Artificial Sequence
  Description of Artificial Sequence:  Target Sequence/siNA sense region
agcggcgcgcgcagcccgc

SEQ ID NO: 16 - RNA, 19 nt, Artificial Sequence
  Description of Artificial Sequence:  Target Sequence/siNA sense region
cgcccuuccccccggcgcg

SEQ ID NO: 17 - RNA, 19 nt, Artificial Sequence
  Description of Artificial Sequence:  Target Sequence/siNA sense region
gccccgccccgcgcgccga

SEQ ID NO: 18 - RNA, 19 nt, Artificial Sequence
  Description of Artificial Sequence:  Target Sequence/siNA sense region
agcgccccgcuccgccuca

SEQ ID NO: 19 - RNA, 19 nt, Artificial Sequence
  Description of Artificial Sequence:  Target Sequence/siNA sense region
accugccaccagggagugg

SEQ ID NO: 20 - RNA, 19 nt, Artificial Sequence
  Description of Artificial Sequence:  Target Sequence/siNA sense region
ggcgggcauuguucgccgc

SEQ ID NO: 21 - RNA, 19 nt, Artificial Sequence
  Description of Artificial Sequence:  Target Sequence/siNA sense region
ccgccgccgccgcgcgggg

SEQ ID NO: 22 - RNA, 19 nt, Artificial Sequence
  Description of Artificial Sequence:  Target Sequence/siNA sense region
gccaugggggccgcccggc

SEQ ID NO: 23 - RNA, 19 nt, Artificial Sequence
  Description of Artificial Sequence:  Target Sequence/siNA sense region
cgcccggggccgggccugg

SEQ ID NO: 24 - RNA, 19 nt, Artificial Sequence
  Description of Artificial Sequence:  Target Sequence/siNA sense region
gcgaggccgccgcgccgcc

SEQ ID NO: 25 - RNA, 19 nt, Artificial Sequence
  Description of Artificial Sequence:  Target Sequence/siNA sense region
cgcugagacgggccccgcg

SEQ ID NO: 26 - RNA, 19 nt, Artificial Sequence
  Description of Artificial Sequence:  Target Sequence/siNA sense region
gcgcagcccggcggcgcag

SEQ ID NO: 27 - RNA, 19 nt, Artificial Sequence
  Description of Artificial Sequence:  Target Sequence/siNA sense region
gguaaggccggccgcgcca

SEQ ID NO: 28 - RNA, 19 nt, Artificial Sequence
  Description of Artificial Sequence:  Target Sequence/siNA sense region
augguggacccggugggcu

SEQ ID NO: 29 - RNA, 19 nt, Artificial Sequence
  Description of Artificial Sequence:  Target Sequence/siNA sense region
uucgcggaggcguggaagg

SEQ ID NO: 30 - RNA, 19 nt, Artificial Sequence
  Description of Artificial Sequence:  Target Sequence/siNA sense region
gcgcaguucccggacucag

SEQ ID NO: 31 - RNA, 19 nt, Artificial Sequence
  Description of Artificial Sequence:  Target Sequence/siNA sense region
gagcccccgcgcauggagc

SEQ ID NO: 32 - RNA, 19 nt, Artificial Sequence
  Description of Artificial Sequence:  Target Sequence/siNA sense region
cugcgcucagugggcgaca

SEQ ID NO: 33 - RNA, 19 nt, Artificial Sequence
  Description of Artificial Sequence:  Target Sequence/siNA sense region
aucgagcaggagcuggagc

SEQ ID NO: 34 - RNA, 19 nt, Artificial Sequence
  Description of Artificial Sequence:  Target Sequence/siNA sense region
cgcugcaaggccuccauuc

SEQ ID NO: 35 - RNA, 19 nt, Artificial Sequence
  Description of Artificial Sequence:  Target Sequence/siNA sense region
cggcgccuggagcaggagg

SEQ ID NO: 36 - RNA, 19 nt, Artificial Sequence
  Description of Artificial Sequence:  Target Sequence/siNA sense region
gugaaccaggagcgcuucc

SEQ ID NO: 37 - RNA, 19 nt, Artificial Sequence
  Description of Artificial Sequence:  Target Sequence/siNA sense region
cgcaugaucuaccugcaga

SEQ ID NO: 38 - RNA, 19 nt, Artificial Sequence
  Description of Artificial Sequence:  Target Sequence/siNA sense region
acguugcuggccaaggaaa

SEQ ID NO: 39 - RNA, 19 nt, Artificial Sequence
  Description of Artificial Sequence:  Target Sequence/siNA sense region
aagaagagcuaugaccggc

SEQ ID NO: 40 - RNA, 19 nt, Artificial Sequence
  Description of Artificial Sequence:  Target Sequence/siNA sense region
cagcgauggggcuuccggc

SEQ ID NO: 41 - RNA, 19 nt, Artificial Sequence
  Description of Artificial Sequence:  Target Sequence/siNA sense region
cgcgcggcgcaggcccccg

SEQ ID NO: 42 - RNA, 19 nt, Artificial Sequence
  Description of Artificial Sequence:  Target Sequence/siNA sense region
gacggcgccuccgagcccc

SEQ ID NO: 43 - RNA, 19 nt, Artificial Sequence
  Description of Artificial Sequence:  Target Sequence/siNA sense region
cgagcguccgcgucgcgcc

SEQ ID NO: 44 - RNA, 19 nt, Artificial Sequence
  Description of Artificial Sequence:  Target Sequence/siNA sense region
ccgcagccagcgcccgccg

SEQ ID NO: 45 - RNA, 19 nt, Artificial Sequence
  Description of Artificial Sequence:  Target Sequence/siNA sense region
gacggagccgacccgccgc

SEQ ID NO: 46 - RNA, 19 nt, Artificial Sequence
  Description of Artificial Sequence:  Target Sequence/siNA sense region
cccgccgaggagcccgagg

SEQ ID NO: 47 - RNA, 19 nt, Artificial Sequence
  Description of Artificial Sequence:  Target Sequence/siNA sense region
gcccggcccgacggcgagg

SEQ ID NO: 48 - RNA, 19 nt, Artificial Sequence
  Description of Artificial Sequence:  Target Sequence/siNA sense region
gguucuccggguaaggcca

SEQ ID NO: 49 - RNA, 19 nt, Artificial Sequence
  Description of Artificial Sequence:  Target Sequence/siNA sense region
aggcccgggaccgcccgca

SEQ ID NO: 50 - RNA, 19 nt, Artificial Sequence
  Description of Artificial Sequence:  Target Sequence/siNA sense region
aggcccggggcagccgcgu

SEQ ID NO: 51 - RNA, 19 nt, Artificial Sequence
  Description of Artificial Sequence:  Target Sequence/siNA sense region
ucgggggaacgggacgacc

SEQ ID NO: 52 - RNA, 19 nt, Artificial Sequence
  Description of Artificial Sequence:  Target Sequence/siNA sense region
cggggaccccccgccagcg

SEQ ID NO: 53 - RNA, 19 nt, Artificial Sequence
  Description of Artificial Sequence:  Target Sequence/siNA sense region
guggcggcgcucaggucca

SEQ ID NO: 54 - RNA, 19 nt, Artificial Sequence
  Description of Artificial Sequence:  Target Sequence/siNA sense region
aacuucgagcggauccgca

SEQ ID NO: 55 - RNA, 19 nt, Artificial Sequence
  Description of Artificial Sequence:  Target Sequence/siNA sense region
aagggccauggccagcccg

SEQ ID NO: 56 - RNA, 19 nt, Artificial Sequence
  Description of Artificial Sequence:  Target Sequence/siNA sense region
ggggcggacgccgagaagc

SEQ ID NO: 57 - RNA, 19 nt, Artificial Sequence
  Description of Artificial Sequence:  Target Sequence/siNA sense region
cccuucuacgugaacgucg

SEQ ID NO: 58 - RNA, 19 nt, Artificial Sequence
  Description of Artificial Sequence:  Target Sequence/siNA sense region
gaguuucaccacgagcgcg

SEQ ID NO: 59 - RNA, 19 nt, Artificial Sequence
  Description of Artificial Sequence:  Target Sequence/siNA sense region
ggccuggugaaggucaacg

SEQ ID NO: 60 - RNA, 19 nt, Artificial Sequence
  Description of Artificial Sequence:  Target Sequence/siNA sense region
gacaaagaggugucggacc

SEQ ID NO: 61 - RNA, 19 nt, Artificial Sequence
  Description of Artificial Sequence:  Target Sequence/siNA sense region
cgcaucagcucccugggca

SEQ ID NO: 62 - RNA, 19 nt, Artificial Sequence
  Description of Artificial Sequence:  Target Sequence/siNA sense region
agccaggccaugcagaugg

SEQ ID NO: 63 - RNA, 19 nt, Artificial Sequence
  Description of Artificial Sequence:  Target Sequence/siNA sense region
gagcgcaaaaagucccagc

SEQ ID NO: 64 - RNA, 19 nt, Artificial Sequence
  Description of Artificial Sequence:  Target Sequence/siNA sense region
cacggcgcgggcucgagcg

SEQ ID NO: 65 - RNA, 19 nt, Artificial Sequence
  Description of Artificial Sequence:  Target Sequence/siNA sense region
gugggggaugcauccaggc

SEQ ID NO: 66 - RNA, 19 nt, Artificial Sequence
  Description of Artificial Sequence:  Target Sequence/siNA sense region
cccccuuaccggggacgcu

SEQ ID NO: 67 - RNA, 19 nt, Artificial Sequence
  Description of Artificial Sequence:  Target Sequence/siNA sense region
uccucggagagcagcugcg

SEQ ID NO: 68 - RNA, 19 nt, Artificial Sequence
  Description of Artificial Sequence:  Target Sequence/siNA sense region
ggcgucgacggcgacuacg

SEQ ID NO: 69 - RNA, 19 nt, Artificial Sequence
  Description of Artificial Sequence:  Target Sequence/siNA sense region
gaggacgccgaguugaacc

SEQ ID NO: 70 - RNA, 19 nt, Artificial Sequence
  Description of Artificial Sequence:  Target Sequence/siNA sense region
ccccgcuuccugaaggaca

SEQ ID NO: 71 - RNA, 19 nt, Artificial Sequence
  Description of Artificial Sequence:  Target Sequence/siNA sense region
aaccugaucgacgccaaug

SEQ ID NO: 72 - RNA, 19 nt, Artificial Sequence
  Description of Artificial Sequence:  Target Sequence/siNA sense region
ggcgguagcaggcccccuu

SEQ ID NO: 73 - RNA, 19 nt, Artificial Sequence
  Description of Artificial Sequence:  Target Sequence/siNA sense region
uggccgccccuggaguacc

SEQ ID NO: 74 - RNA, 19 nt, Artificial Sequence
  Description of Artificial Sequence:  Target Sequence/siNA sense region
cagcccuaccagagcaucu

SEQ ID NO: 75 - RNA, 19 nt, Artificial Sequence
  Description of Artificial Sequence:  Target Sequence/siNA sense region
uacgucgggggcaugaugg

SEQ ID NO: 76 - RNA, 19 nt, Artificial Sequence
  Description of Artificial Sequence:  Target Sequence/siNA sense region
gaaggggagggcaagggcc

SEQ ID NO: 77 - RNA, 19 nt, Artificial Sequence
  Description of Artificial Sequence:  Target Sequence/siNA sense region
ccgcuccugcgcagccaga

SEQ ID NO: 78 - RNA, 19 nt, Artificial Sequence
  Description of Artificial Sequence:  Target Sequence/siNA sense region
agcaccucugagcaggaga

SEQ ID NO: 79 - RNA, 19 nt, Artificial Sequence
  Description of Artificial Sequence:  Target Sequence/siNA sense region
aagcgccuuaccuggcccc

SEQ ID NO: 80 - RNA, 19 nt, Artificial Sequence
  Description of Artificial Sequence:  Target Sequence/siNA sense region
cgcagguccuacucccccc

SEQ ID NO: 81 - RNA, 19 nt, Artificial Sequence
  Description of Artificial Sequence:  Target Sequence/siNA sense region
cggaguuuugaggauugcg

SEQ ID NO: 82 - RNA, 19 nt, Artificial Sequence
  Description of Artificial Sequence:  Target Sequence/siNA sense region
ggaggcggcuauaccccgg

SEQ ID NO: 83 - RNA, 19 nt, Artificial Sequence
  Description of Artificial Sequence:  Target Sequence/siNA sense region
gacugcagcuccaaugaga

SEQ ID NO: 84 - RNA, 19 nt, Artificial Sequence
  Description of Artificial Sequence:  Target Sequence/siNA sense region
aaccucaccuccagcgagg

SEQ ID NO: 85 - RNA, 19 nt, Artificial Sequence
  Description of Artificial Sequence:  Target Sequence/siNA sense region
gaggacuucuccucuggcc

SEQ ID NO: 86 - RNA, 19 nt, Artificial Sequence
  Description of Artificial Sequence:  Target Sequence/siNA sense region
caguccagccgcguguccc

SEQ ID NO: 87 - RNA, 19 nt, Artificial Sequence
  Description of Artificial Sequence:  Target Sequence/siNA sense region
ccaagccccaccaccuacc

SEQ ID NO: 88 - RNA, 19 nt, Artificial Sequence
  Description of Artificial Sequence:  Target Sequence/siNA sense region
cgcauguuccgggacaaaa

SEQ ID NO: 89 - RNA, 19 nt, Artificial Sequence
  Description of Artificial Sequence:  Target Sequence/siNA sense region
agccgcucucccucgcaga

SEQ ID NO: 90 - RNA, 19 nt, Artificial Sequence
  Description of Artificial Sequence:  Target Sequence/siNA sense region
aacucgcaacaguccuucg

SEQ ID NO: 91 - RNA, 19 nt, Artificial Sequence
  Description of Artificial Sequence:  Target Sequence/siNA sense region
gacagcagcagucccccca

SEQ ID NO: 92 - RNA, 19 nt, Artificial Sequence
  Description of Artificial Sequence:  Target Sequence/siNA sense region
acgccgcagugccauaagc

SEQ ID NO: 93 - RNA, 19 nt, Artificial Sequence
  Description of Artificial Sequence:  Target Sequence/siNA sense region
cggcaccggcacugcccgg

SEQ ID NO: 94 - RNA, 19 nt, Artificial Sequence
  Description of Artificial Sequence:  Target Sequence/siNA sense region
guugucguguccgaggcca

SEQ ID NO: 95 - RNA, 19 nt, Artificial Sequence
  Description of Artificial Sequence:  Target Sequence/siNA sense region
accaucgugggcguccgca

SEQ ID NO: 96 - RNA, 19 nt, Artificial Sequence
  Description of Artificial Sequence:  Target Sequence/siNA sense region
aagaccgggcagaucuggc

SEQ ID NO: 97 - RNA, 19 nt, Artificial Sequence
  Description of Artificial Sequence:  Target Sequence/siNA sense region
cccaacgauggcgagggcg

SEQ ID NO: 98 - RNA, 19 nt, Artificial Sequence
  Description of Artificial Sequence:  Target Sequence/siNA sense region
gccuuccauggagacgcag

SEQ ID NO: 99 - RNA, 19 nt, Artificial Sequence
  Description of Artificial Sequence:  Target Sequence/siNA sense region
gauggcucguucggaacac

SEQ ID NO: 100 - RNA, 19 nt, Artificial Sequence
  Description of Artificial Sequence:  Target Sequence/siNA sense region
ccaccuggauacggcugcg

SEQ ID NO: 101 - RNA, 19 nt, Artificial Sequence
  Description of Artificial Sequence:  Target Sequence/siNA sense region
gcugcagaccgggcagagg

SEQ ID NO: 102 - RNA, 19 nt, Artificial Sequence
  Description of Artificial Sequence:  Target Sequence/siNA sense region
gagcagcgccggcaccaag

SEQ ID NO: 103 - RNA, 19 nt, Artificial Sequence
  Description of Artificial Sequence:  Target Sequence/siNA sense region
gaugggcugcccuacauug

SEQ ID NO: 104 - RNA, 19 nt, Artificial Sequence
  Description of Artificial Sequence:  Target Sequence/siNA sense region
gaugacucgcccuccucau

SEQ ID NO: 105 - RNA, 19 nt, Artificial Sequence
  Description of Artificial Sequence:  Target Sequence/siNA sense region
ucgccccaccucagcagca

SEQ ID NO: 106 - RNA, 19 nt, Artificial Sequence
  Description of Artificial Sequence:  Target Sequence/siNA sense region
aagggcaggggcagccggg

SEQ ID NO: 107 - RNA, 19 nt, Artificial Sequence
  Description of Artificial Sequence:  Target Sequence/siNA sense region
gaugcgcuggucucgggag

SEQ ID NO: 108 - RNA, 19 nt, Artificial Sequence
  Description of Artificial Sequence:  Target Sequence/siNA sense region
gcccuggaguccacuaaag

SEQ ID NO: 109 - RNA, 19 nt, Artificial Sequence
  Description of Artificial Sequence:  Target Sequence/siNA sense region
gcgagugagcuggacuugg

SEQ ID NO: 110 - RNA, 19 nt, Artificial Sequence
  Description of Artificial Sequence:  Target Sequence/siNA sense region
gaaaagggcuuggagauga

SEQ ID NO: 111 - RNA, 19 nt, Artificial Sequence
  Description of Artificial Sequence:  Target Sequence/siNA sense region
agaaaauggguccugucgg

SEQ ID NO: 112 - RNA, 19 nt, Artificial Sequence
  Description of Artificial Sequence:  Target Sequence/siNA sense region
ggaauccuggcuagcgagg

SEQ ID NO: 113 - RNA, 19 nt, Artificial Sequence
  Description of Artificial Sequence:  Target Sequence/siNA sense region
gagacuuaccugagccacc

SEQ ID NO: 114 - RNA, 19 nt, Artificial Sequence
  Description of Artificial Sequence:  Target Sequence/siNA sense region
cuggaggcacugcugcugc

SEQ ID NO: 115 - RNA, 19 nt, Artificial Sequence
  Description of Artificial Sequence:  Target Sequence/siNA sense region
cccaugaagccuuugaaag

SEQ ID NO: 116 - RNA, 19 nt, Artificial Sequence
  Description of Artificial Sequence:  Target Sequence/siNA sense region
gccgcugccaccaccucuc

SEQ ID NO: 117 - RNA, 19 nt, Artificial Sequence
  Description of Artificial Sequence:  Target Sequence/siNA sense region
cagccggugcugacgaguc

SEQ ID NO: 118 - RNA, 19 nt, Artificial Sequence
  Description of Artificial Sequence:  Target Sequence/siNA sense region
cagcagaucgagaccaucu

SEQ ID NO: 119 - RNA, 19 nt, Artificial Sequence
  Description of Artificial Sequence:  Target Sequence/siNA sense region
uucuucaaagugccugagc

SEQ ID NO: 120 - RNA, 19 nt, Artificial Sequence
  Description of Artificial Sequence:  Target Sequence/siNA sense region
cucuacgagauccacaagg

SEQ ID NO: 121 - RNA, 19 nt, Artificial Sequence
  Description of Artificial Sequence:  Target Sequence/siNA sense region
gaguucuaugaugggcucu

SEQ ID NO: 122 - RNA, 19 nt, Artificial Sequence
  Description of Artificial Sequence:  Target Sequence/siNA sense region
uucccccgcgugcagcagu

SEQ ID NO: 123 - RNA, 19 nt, Artificial Sequence
  Description of Artificial Sequence:  Target Sequence/siNA sense region
uggagccaccagcagcggg

SEQ ID NO: 124 - RNA, 19 nt, Artificial Sequence
  Description of Artificial Sequence:  Target Sequence/siNA sense region
gugggcgaccucuuccaga

SEQ ID NO: 125 - RNA, 19 nt, Artificial Sequence
  Description of Artificial Sequence:  Target Sequence/siNA sense region
aagcuggccagccagcugg

SEQ ID NO: 126 - RNA, 19 nt, Artificial Sequence
  Description of Artificial Sequence:  Target Sequence/siNA sense region
gguguguaccgggccuucg

SEQ ID NO: 127 - RNA, 19 nt, Artificial Sequence
  Description of Artificial Sequence:  Target Sequence/siNA sense region
guggacaacuacggaguug

SEQ ID NO: 128 - RNA, 19 nt, Artificial Sequence
  Description of Artificial Sequence:  Target Sequence/siNA sense region
gccauggaaauggcugaga

SEQ ID NO: 129 - RNA, 19 nt, Artificial Sequence
  Description of Artificial Sequence:  Target Sequence/siNA sense region
aagugcugucaggccaaug

SEQ ID NO: 130 - RNA, 19 nt, Artificial Sequence
  Description of Artificial Sequence:  Target Sequence/siNA sense region
gcucaguuugcagaaaucu

SEQ ID NO: 131 - RNA, 19 nt, Artificial Sequence
  Description of Artificial Sequence:  Target Sequence/siNA sense region
uccgagaaccugagagcca

SEQ ID NO: 132 - RNA, 19 nt, Artificial Sequence
  Description of Artificial Sequence:  Target Sequence/siNA sense region
agaagcaacaaagaugcca

SEQ ID NO: 133 - RNA, 19 nt, Artificial Sequence
  Description of Artificial Sequence:  Target Sequence/siNA sense region
aaggauccaacgaccaaga

SEQ ID NO: 134 - RNA, 19 nt, Artificial Sequence
  Description of Artificial Sequence:  Target Sequence/siNA sense region
aacucucuggaaacucugc

SEQ ID NO: 135 - RNA, 19 nt, Artificial Sequence
  Description of Artificial Sequence:  Target Sequence/siNA sense region
cucuacaagccuguggacc

SEQ ID NO: 136 - RNA, 19 nt, Artificial Sequence
  Description of Artificial Sequence:  Target Sequence/siNA sense region
cgugugacgaggagcacgc

SEQ ID NO: 137 - RNA, 19 nt, Artificial Sequence
  Description of Artificial Sequence:  Target Sequence/siNA sense region
cugguccuccaugacuugc

SEQ ID NO: 138 - RNA, 19 nt, Artificial Sequence
  Description of Artificial Sequence:  Target Sequence/siNA sense region
cugaagcacacuccugcca

SEQ ID NO: 139 - RNA, 19 nt, Artificial Sequence
  Description of Artificial Sequence:  Target Sequence/siNA sense region
agccacccugaccaccccu

SEQ ID NO: 140 - RNA, 19 nt, Artificial Sequence
  Description of Artificial Sequence:  Target Sequence/siNA sense region
uugcugcaggacgcccucc

SEQ ID NO: 141 - RNA, 19 nt, Artificial Sequence
  Description of Artificial Sequence:  Target Sequence/siNA sense region
cgcaucucacagaacuucc

SEQ ID NO: 142 - RNA, 19 nt, Artificial Sequence
  Description of Artificial Sequence:  Target Sequence/siNA sense region
cuguccagcaucaaugagg

SEQ ID NO: 143 - RNA, 19 nt, Artificial Sequence
  Description of Artificial Sequence:  Target Sequence/siNA sense region
gagaucacaccccgacggc

SEQ ID NO: 144 - RNA, 19 nt, Artificial Sequence
  Description of Artificial Sequence:  Target Sequence/siNA sense region
caguccaugacggugaaga

SEQ ID NO: 145 - RNA, 19 nt, Artificial Sequence
  Description of Artificial Sequence:  Target Sequence/siNA sense region
aagggagagcaccggcagc

SEQ ID NO: 146 - RNA, 19 nt, Artificial Sequence
  Description of Artificial Sequence:  Target Sequence/siNA sense region
cugcugaaggacagcuuca

SEQ ID NO: 147 - RNA, 19 nt, Artificial Sequence
  Description of Artificial Sequence:  Target Sequence/siNA sense region
augguggagcugguggagg

SEQ ID NO: 148 - RNA, 19 nt, Artificial Sequence
  Description of Artificial Sequence:  Target Sequence/siNA sense region
ggggcccgcaagcugcgcc

SEQ ID NO: 149 - RNA, 19 nt, Artificial Sequence
  Description of Artificial Sequence:  Target Sequence/siNA sense region
cacgucuuccuguucaccg

SEQ ID NO: 150 - RNA, 19 nt, Artificial Sequence
  Description of Artificial Sequence:  Target Sequence/siNA sense region
gagcugcuucucugcacca

SEQ ID NO: 151 - RNA, 19 nt, Artificial Sequence
  Description of Artificial Sequence:  Target Sequence/siNA sense region
aagcucaagaagcagagcg

SEQ ID NO: 152 - RNA, 19 nt, Artificial Sequence
  Description of Artificial Sequence:  Target Sequence/siNA sense region
ggaggcaaaacgcagcagu

SEQ ID NO: 153 - RNA, 19 nt, Artificial Sequence
  Description of Artificial Sequence:  Target Sequence/siNA sense region
uaugacugcaaaugguaca

SEQ ID NO: 154 - RNA, 19 nt, Artificial Sequence
  Description of Artificial Sequence:  Target Sequence/siNA sense region
auuccgcucacggaucuca

SEQ ID NO: 155 - RNA, 19 nt, Artificial Sequence
  Description of Artificial Sequence:  Target Sequence/siNA sense region
agcuuccagaugguggaug

SEQ ID NO: 156 - RNA, 19 nt, Artificial Sequence
  Description of Artificial Sequence:  Target Sequence/siNA sense region
gaacuggaggcagugccca

SEQ ID NO: 157 - RNA, 19 nt, Artificial Sequence
  Description of Artificial Sequence:  Target Sequence/siNA sense region
aacaucccccuggugcccg

SEQ ID NO: 158 - RNA, 19 nt, Artificial Sequence
  Description of Artificial Sequence:  Target Sequence/siNA sense region
gaugaggagcuggacgcuu

SEQ ID NO: 159 - RNA, 19 nt, Artificial Sequence
  Description of Artificial Sequence:  Target Sequence/siNA sense region
uugaagaucaagaucuccc

SEQ ID NO: 160 - RNA, 19 nt, Artificial Sequence
  Description of Artificial Sequence:  Target Sequence/siNA sense region
cagaucaagagugacaucc

SEQ ID NO: 161 - RNA, 19 nt, Artificial Sequence
  Description of Artificial Sequence:  Target Sequence/siNA sense region
cagagagagaagagggcga

SEQ ID NO: 162 - RNA, 19 nt, Artificial Sequence
  Description of Artificial Sequence:  Target Sequence/siNA sense region
aacaagggcagcaaggcua

SEQ ID NO: 163 - RNA, 19 nt, Artificial Sequence
  Description of Artificial Sequence:  Target Sequence/siNA sense region
acggagaggcugaagaaga

SEQ ID NO: 164 - RNA, 19 nt, Artificial Sequence
  Description of Artificial Sequence:  Target Sequence/siNA sense region
aagcugucggagcaggagu

SEQ ID NO: 165 - RNA, 19 nt, Artificial Sequence
  Description of Artificial Sequence:  Target Sequence/siNA sense region
ucacugcugcugcuuaugu

SEQ ID NO: 166 - RNA, 19 nt, Artificial Sequence
  Description of Artificial Sequence:  Target Sequence/siNA sense region
ucucccagcauggccuuca

SEQ ID NO: 167 - RNA, 19 nt, Artificial Sequence
  Description of Artificial Sequence:  Target Sequence/siNA sense region
agggugcacagccgcaacg

SEQ ID NO: 168 - RNA, 19 nt, Artificial Sequence
  Description of Artificial Sequence:  Target Sequence/siNA sense region
ggcaagaguuacacguucc

SEQ ID NO: 169 - RNA, 19 nt, Artificial Sequence
  Description of Artificial Sequence:  Target Sequence/siNA sense region
cugaucuccucugacuaug

SEQ ID NO: 170 - RNA, 19 nt, Artificial Sequence
  Description of Artificial Sequence:  Target Sequence/siNA sense region
gagcgugcagaguggaggg

SEQ ID NO: 171 - RNA, 19 nt, Artificial Sequence
  Description of Artificial Sequence:  Target Sequence/siNA sense region
gagaacauccgggagcagc

SEQ ID NO: 172 - RNA, 19 nt, Artificial Sequence
  Description of Artificial Sequence:  Target Sequence/siNA sense region
cagaagaaguguuucagaa

SEQ ID NO: 173 - RNA, 19 nt, Artificial Sequence
  Description of Artificial Sequence:  Target Sequence/siNA sense region
agcuucucccugacauccg

SEQ ID NO: 174 - RNA, 19 nt, Artificial Sequence
  Description of Artificial Sequence:  Target Sequence/siNA sense region
guggagcugcagaugcuga

SEQ ID NO: 175 - RNA, 19 nt, Artificial Sequence
  Description of Artificial Sequence:  Target Sequence/siNA sense region
accaacucgugugugaaac

SEQ ID NO: 176 - RNA, 19 nt, Artificial Sequence
  Description of Artificial Sequence:  Target Sequence/siNA sense region
cuccagacuguccacagca

SEQ ID NO: 177 - RNA, 19 nt, Artificial Sequence
  Description of Artificial Sequence:  Target Sequence/siNA sense region
auuccgcugaccaucaaua

SEQ ID NO: 178 - RNA, 19 nt, Artificial Sequence
  Description of Artificial Sequence:  Target Sequence/siNA sense region
aaggaagaugaugagucuc

SEQ ID NO: 179 - RNA, 19 nt, Artificial Sequence
  Description of Artificial Sequence:  Target Sequence/siNA sense region
ccggggcucuauggguuuc

SEQ ID NO: 180 - RNA, 19 nt, Artificial Sequence
  Description of Artificial Sequence:  Target Sequence/siNA sense region
cugaaugucaucguccacu

SEQ ID NO: 181 - RNA, 19 nt, Artificial Sequence
  Description of Artificial Sequence:  Target Sequence/siNA sense region
ucagccacuggauuuaagc

SEQ ID NO: 182 - RNA, 19 nt, Artificial Sequence
  Description of Artificial Sequence:  Target Sequence/siNA sense region
cagaguucaaaucuguacu

SEQ ID NO: 183 - RNA, 19 nt, Artificial Sequence
  Description of Artificial Sequence:  Target Sequence/siNA sense region
ugcacccuggagguggauu

SEQ ID NO: 184 - RNA, 19 nt, Artificial Sequence
  Description of Artificial Sequence:  Target Sequence/siNA sense region
uccuuuggguauuuuguga

SEQ ID NO: 185 - RNA, 19 nt, Artificial Sequence
  Description of Artificial Sequence:  Target Sequence/siNA sense region
aauaaagcaaagacgcgcg

SEQ ID NO: 186 - RNA, 19 nt, Artificial Sequence
  Description of Artificial Sequence:  Target Sequence/siNA sense region
gucuacagggacacagcug

SEQ ID NO: 187 - RNA, 19 nt, Artificial Sequence
  Description of Artificial Sequence:  Target Sequence/siNA sense region
gagccaaacuggaacgagg

SEQ ID NO: 188 - RNA, 19 nt, Artificial Sequence
  Description of Artificial Sequence:  Target Sequence/siNA sense region
gaauuugagauagagcugg

SEQ ID NO: 189 - RNA, 19 nt, Artificial Sequence
  Description of Artificial Sequence:  Target Sequence/siNA sense region
gagggcucccagacccuga

SEQ ID NO: 190 - RNA, 19 nt, Artificial Sequence
  Description of Artificial Sequence:  Target Sequence/siNA sense region
aggauacugugcuaugaaa

SEQ ID NO: 191 - RNA, 19 nt, Artificial Sequence
  Description of Artificial Sequence:  Target Sequence/siNA sense region
aaguguuacaacaagacga

SEQ ID NO: 192 - RNA, 19 nt, Artificial Sequence
  Description of Artificial Sequence:  Target Sequence/siNA sense region
aagauccccaaggaggacg

SEQ ID NO: 193 - RNA, 19 nt, Artificial Sequence
  Description of Artificial Sequence:  Target Sequence/siNA sense region
ggcgagagcacggacagac

SEQ ID NO: 194 - RNA, 19 nt, Artificial Sequence
  Description of Artificial Sequence:  Target Sequence/siNA sense region
cucauggggaagggccagg

SEQ ID NO: 195 - RNA, 19 nt, Artificial Sequence
  Description of Artificial Sequence:  Target Sequence/siNA sense region
guccagcuggacccgcagg

SEQ ID NO: 196 - RNA, 19 nt, Artificial Sequence
  Description of Artificial Sequence:  Target Sequence/siNA sense region
gcccugcaggacagagacu

SEQ ID NO: 197 - RNA, 19 nt, Artificial Sequence
  Description of Artificial Sequence:  Target Sequence/siNA sense region
uggcagcgcaccgucaucg

SEQ ID NO: 198 - RNA, 19 nt, Artificial Sequence
  Description of Artificial Sequence:  Target Sequence/siNA sense region
gccaugaaugggaucgaag

SEQ ID NO: 199 - RNA, 19 nt, Artificial Sequence
  Description of Artificial Sequence:  Target Sequence/siNA sense region
guaaagcucucggucaagu

SEQ ID NO: 200 - RNA, 19 nt, Artificial Sequence
  Description of Artificial Sequence:  Target Sequence/siNA sense region
uucaacagcagggaguuca

SEQ ID NO: 201 - RNA, 19 nt, Artificial Sequence
  Description of Artificial Sequence:  Target Sequence/siNA sense region
agcuugaagaggaugccgu

SEQ ID NO: 202 - RNA, 19 nt, Artificial Sequence
  Description of Artificial Sequence:  Target Sequence/siNA sense region
ucccgaaaacagacagggg

SEQ ID NO: 203 - RNA, 19 nt, Artificial Sequence
  Description of Artificial Sequence:  Target Sequence/siNA sense region
gucuucggagucaagauug

SEQ ID NO: 204 - RNA, 19 nt, Artificial Sequence
  Description of Artificial Sequence:  Target Sequence/siNA sense region
gcuguggucaccaagagag

SEQ ID NO: 205 - RNA, 19 nt, Artificial Sequence
  Description of Artificial Sequence:  Target Sequence/siNA sense region
gagagguccaaggugcccu

SEQ ID NO: 206 - RNA, 19 nt, Artificial Sequence
  Description of Artificial Sequence:  Target Sequence/siNA sense region
uacaucgugcgccagugcg

SEQ ID NO: 207 - RNA, 19 nt, Artificial Sequence
  Description of Artificial Sequence:  Target Sequence/siNA sense region
guggaggagaucgagcgcc

SEQ ID NO: 208 - RNA, 19 nt, Artificial Sequence
  Description of Artificial Sequence:  Target Sequence/siNA sense region
cgaggcauggaggaggugg

SEQ ID NO: 209 - RNA, 19 nt, Artificial Sequence
  Description of Artificial Sequence:  Target Sequence/siNA sense region
ggcaucuaccgcguguccg

SEQ ID NO: 210 - RNA, 19 nt, Artificial Sequence
  Description of Artificial Sequence:  Target Sequence/siNA sense region
gguguggccacggacaucc

SEQ ID NO: 211 - RNA, 19 nt, Artificial Sequence
  Description of Artificial Sequence:  Target Sequence/siNA sense region
caggcacugaaggcagccu

SEQ ID NO: 212 - RNA, 19 nt, Artificial Sequence
  Description of Artificial Sequence:  Target Sequence/siNA sense region
uucgacgucaauaacaagg

SEQ ID NO: 213 - RNA, 19 nt, Artificial Sequence
  Description of Artificial Sequence:  Target Sequence/siNA sense region
gaugugucggugaugauga

SEQ ID NO: 214 - RNA, 19 nt, Artificial Sequence
  Description of Artificial Sequence:  Target Sequence/siNA sense region
agcgagauggacgugaacg

SEQ ID NO: 215 - RNA, 19 nt, Artificial Sequence
  Description of Artificial Sequence:  Target Sequence/siNA sense region
gccaucgcaggcacgcuga

SEQ ID NO: 216 - RNA, 19 nt, Artificial Sequence
  Description of Artificial Sequence:  Target Sequence/siNA sense region
aagcuguacuuccgugagc

SEQ ID NO: 217 - RNA, 19 nt, Artificial Sequence
  Description of Artificial Sequence:  Target Sequence/siNA sense region
cugcccgagccccucuuca

SEQ ID NO: 218 - RNA, 19 nt, Artificial Sequence
  Description of Artificial Sequence:  Target Sequence/siNA sense region
acugacgaguucuacccca

SEQ ID NO: 219 - RNA, 19 nt, Artificial Sequence
  Description of Artificial Sequence:  Target Sequence/siNA sense region
aacuucgcagagggcaucg

SEQ ID NO: 220 - RNA, 19 nt, Artificial Sequence
  Description of Artificial Sequence:  Target Sequence/siNA sense region
gcucuuucagacccgguug

SEQ ID NO: 221 - RNA, 19 nt, Artificial Sequence
  Description of Artificial Sequence:  Target Sequence/siNA sense region
gcaaaggagagcugcaugc

SEQ ID NO: 222 - RNA, 19 nt, Artificial Sequence
  Description of Artificial Sequence:  Target Sequence/siNA sense region
cucaaccugcugcuguccc

SEQ ID NO: 223 - RNA, 19 nt, Artificial Sequence
  Description of Artificial Sequence:  Target Sequence/siNA sense region
cugccggaggccaaccugc

SEQ ID NO: 224 - RNA, 19 nt, Artificial Sequence
  Description of Artificial Sequence:  Target Sequence/siNA sense region
cucaccuuccuuuuccuuc

SEQ ID NO: 225 - RNA, 19 nt, Artificial Sequence
  Description of Artificial Sequence:  Target Sequence/siNA sense region
cuggaccaccugaaaaggg

SEQ ID NO: 226 - RNA, 19 nt, Artificial Sequence
  Description of Artificial Sequence:  Target Sequence/siNA sense region
guggcagagaaggaggcag

SEQ ID NO: 227 - RNA, 19 nt, Artificial Sequence
  Description of Artificial Sequence:  Target Sequence/siNA sense region
gucaauaagaugucccugc

SEQ ID NO: 228 - RNA, 19 nt, Artificial Sequence
  Description of Artificial Sequence:  Target Sequence/siNA sense region
cacaaccucgccacggucu

SEQ ID NO: 229 - RNA, 19 nt, Artificial Sequence
  Description of Artificial Sequence:  Target Sequence/siNA sense region
uuuggccccacgcugcucc

SEQ ID NO: 230 - RNA, 19 nt, Artificial Sequence
  Description of Artificial Sequence:  Target Sequence/siNA sense region
cggcccuccgagaaggaga

SEQ ID NO: 231 - RNA, 19 nt, Artificial Sequence
  Description of Artificial Sequence:  Target Sequence/siNA sense region
agcaagcucccugccaacc

SEQ ID NO: 232 - RNA, 19 nt, Artificial Sequence
  Description of Artificial Sequence:  Target Sequence/siNA sense region
cccagccagccuaucacca

SEQ ID NO: 233 - RNA, 19 nt, Artificial Sequence
  Description of Artificial Sequence:  Target Sequence/siNA sense region
augacugacagcugguccu

SEQ ID NO: 234 - RNA, 19 nt, Artificial Sequence
  Description of Artificial Sequence:  Target Sequence/siNA sense region
uuggaggucaugucccagg

SEQ ID NO: 235 - RNA, 19 nt, Artificial Sequence
  Description of Artificial Sequence:  Target Sequence/siNA sense region
guccaggugcugcuguacu

SEQ ID NO: 236 - RNA, 19 nt, Artificial Sequence
  Description of Artificial Sequence:  Target Sequence/siNA sense region
uuccugcagcuggaggcca

SEQ ID NO: 237 - RNA, 19 nt, Artificial Sequence
  Description of Artificial Sequence:  Target Sequence/siNA sense region
aucccugccccggacagca

SEQ ID NO: 238 - RNA, 19 nt, Artificial Sequence
  Description of Artificial Sequence:  Target Sequence/siNA sense region
aagagacagagcauccugu

SEQ ID NO: 239 - RNA, 19 nt, Artificial Sequence
  Description of Artificial Sequence:  Target Sequence/siNA sense region
uucuccaccgaagucuaaa

SEQ ID NO: 240 - RNA, 19 nt, Artificial Sequence
  Description of Artificial Sequence:  Target Sequence/siNA sense region
aggucccaguccaucuccu

SEQ ID NO: 241 - RNA, 19 nt, Artificial Sequence
  Description of Artificial Sequence:  Target Sequence/siNA sense region
uggaggcagacagauggcc

SEQ ID NO: 242 - RNA, 19 nt, Artificial Sequence
  Description of Artificial Sequence:  Target Sequence/siNA sense region
cuggaaaccucuggcuaau

SEQ ID NO: 243 - RNA, 19 nt, Artificial Sequence
  Description of Artificial Sequence:  Target Sequence/siNA sense region
ucgggccauccguagagcg

SEQ ID NO: 244 - RNA, 19 nt, Artificial Sequence
  Description of Artificial Sequence:  Target Sequence/siNA sense region
gggaaccuuccugaggugu

SEQ ID NO: 245 - RNA, 19 nt, Artificial Sequence
  Description of Artificial Sequence:  Target Sequence/siNA sense region
uccuugggccacccccaag

SEQ ID NO: 246 - RNA, 19 nt, Artificial Sequence
  Description of Artificial Sequence:  Target Sequence/siNA sense region
guguugggccaucugccaa

SEQ ID NO: 247 - RNA, 19 nt, Artificial Sequence
  Description of Artificial Sequence:  Target Sequence/siNA sense region
agagacagcgacccaaagc

SEQ ID NO: 248 - RNA, 19 nt, Artificial Sequence
  Description of Artificial Sequence:  Target Sequence/siNA sense region
ccgaaggacagguggccug

SEQ ID NO: 249 - RNA, 19 nt, Artificial Sequence
  Description of Artificial Sequence:  Target Sequence/siNA sense region
gggcagaucucgcccaggu

SEQ ID NO: 250 - RNA, 19 nt, Artificial Sequence
  Description of Artificial Sequence:  Target Sequence/siNA sense region
ucugggagccccaggcugg

SEQ ID NO: 251 - RNA, 19 nt, Artificial Sequence
  Description of Artificial Sequence:  Target Sequence/siNA sense region
gccucagacugugguuuuu

SEQ ID NO: 252 - RNA, 19 nt, Artificial Sequence
  Description of Artificial Sequence:  Target Sequence/siNA sense region
uuauguggccacccgaggg

SEQ ID NO: 253 - RNA, 19 nt, Artificial Sequence
  Description of Artificial Sequence:  Target Sequence/siNA sense region
gcgccccaagccaguucau

SEQ ID NO: 254 - RNA, 19 nt, Artificial Sequence
  Description of Artificial Sequence:  Target Sequence/siNA sense region
ucucagaguccaggccuga

SEQ ID NO: 255 - RNA, 19 nt, Artificial Sequence
  Description of Artificial Sequence:  Target Sequence/siNA sense region
acccugggagacaggguga

SEQ ID NO: 256 - RNA, 19 nt, Artificial Sequence
  Description of Artificial Sequence:  Target Sequence/siNA sense region
aagggagugauuuuuauga

SEQ ID NO: 257 - RNA, 19 nt, Artificial Sequence
  Description of Artificial Sequence:  Target Sequence/siNA sense region
aacuuaacuuagagucuaa

SEQ ID NO: 258 - RNA, 19 nt, Artificial Sequence
  Description of Artificial Sequence:  Target Sequence/siNA sense region
aaagauuucuacuggauca

SEQ ID NO: 259 - RNA, 19 nt, Artificial Sequence
  Description of Artificial Sequence:  Target Sequence/siNA sense region
acuugucaagaugcgcccu

SEQ ID NO: 260 - RNA, 19 nt, Artificial Sequence
  Description of Artificial Sequence:  Target Sequence/siNA sense region
ucucuggggagaagggaac

SEQ ID NO: 261 - RNA, 19 nt, Artificial Sequence
  Description of Artificial Sequence:  Target Sequence/siNA sense region
cgugaccggauucccucac

SEQ ID NO: 262 - RNA, 19 nt, Artificial Sequence
  Description of Artificial Sequence:  Target Sequence/siNA sense region
cuguuguaucuugaauaaa

SEQ ID NO: 263 - RNA, 19 nt, Artificial Sequence
  Description of Artificial Sequence:  Target Sequence/siNA sense region
acgcugcugcuucauccug

SEQ ID NO: 264 - RNA, 19 nt, Artificial Sequence
  Description of Artificial Sequence:  siNA antisense region
gcuacuccuaccuaucucc

SEQ ID NO: 265 - RNA, 19 nt, Artificial Sequence
  Description of Artificial Sequence:  siNA antisense region
acucaucgcccuuaccacg

SEQ ID NO: 266 - RNA, 19 nt, Artificial Sequence
  Description of Artificial Sequence:  siNA antisense region
cacucccgcccggcccaca

SEQ ID NO: 267 - RNA, 19 nt, Artificial Sequence
  Description of Artificial Sequence:  siNA antisense region
gccagccggcucucgccgc

SEQ ID NO: 268 - RNA, 19 nt, Artificial Sequence
  Description of Artificial Sequence:  siNA antisense region
ccucggacgcuaagcucag

SEQ ID NO: 269 - RNA, 19 nt, Artificial Sequence
  Description of Artificial Sequence:  siNA antisense region
ccgccgccgccgccgccuc

SEQ ID NO: 270 - RNA, 19 nt, Artificial Sequence
  Description of Artificial Sequence:  siNA antisense region
ccgccgccgccgcugccgc

SEQ ID NO: 271 - RNA, 19 nt, Artificial Sequence
  Description of Artificial Sequence:  siNA antisense region
ccgcaccgccccacagccc

SEQ ID NO: 272 - RNA, 19 nt, Artificial Sequence
  Description of Artificial Sequence:  siNA antisense region
gcuccucgccucucgcuuc

SEQ ID NO: 273 - RNA, 19 nt, Artificial Sequence
  Description of Artificial Sequence:  siNA antisense region
ucuggccacggcccgcgcg

SEQ ID NO: 274 - RNA, 19 nt, Artificial Sequence
  Description of Artificial Sequence:  siNA antisense region
gccaggccgccgccagacu

SEQ ID NO: 275 - RNA, 19 nt, Artificial Sequence
  Description of Artificial Sequence:  siNA antisense region
ggcgcugcucuccgcuccg

SEQ ID NO: 276 - RNA, 19 nt, Artificial Sequence
  Description of Artificial Sequence:  siNA antisense region
uccgcacggcgaggcgcgg

SEQ ID NO: 277 - RNA, 19 nt, Artificial Sequence
  Description of Artificial Sequence:  siNA antisense region
uauugugugcggggcuccu

SEQ ID NO: 278 - RNA, 19 nt, Artificial Sequence
  Description of Artificial Sequence:  siNA antisense region
gcgggcugcgcgcgccgcu

SEQ ID NO: 279 - RNA, 19 nt, Artificial Sequence
  Description of Artificial Sequence:  siNA antisense region
cgcgccggggggaagggcg

SEQ ID NO: 280 - RNA, 19 nt, Artificial Sequence
  Description of Artificial Sequence:  siNA antisense region
ucggcgcgcggggcggggc

SEQ ID NO: 281 - RNA, 19 nt, Artificial Sequence
  Description of Artificial Sequence:  siNA antisense region
ugaggcggagcggggcgcu

SEQ ID NO: 282 - RNA, 19 nt, Artificial Sequence
  Description of Artificial Sequence:  siNA antisense region
ccacucccugguggcaggu

SEQ ID NO: 283 - RNA, 19 nt, Artificial Sequence
  Description of Artificial Sequence:  siNA antisense region
gcggcgaacaaugcccgcc

SEQ ID NO: 284 - RNA, 19 nt, Artificial Sequence
  Description of Artificial Sequence:  siNA antisense region
ccccgcgcggcggcggcgg

SEQ ID NO: 285 - RNA, 19 nt, Artificial Sequence
  Description of Artificial Sequence:  siNA antisense region
gccgggcggcccccauggc

SEQ ID NO: 286 - RNA, 19 nt, Artificial Sequence
  Description of Artificial Sequence:  siNA antisense region
ccaggcccggccccgggcg

SEQ ID NO: 287 - RNA, 19 nt, Artificial Sequence
  Description of Artificial Sequence:  siNA antisense region
ggcggcgcggcggccucgc

SEQ ID NO: 288 - RNA, 19 nt, Artificial Sequence
  Description of Artificial Sequence:  siNA antisense region
cgcggggcccgucucagcg

SEQ ID NO: 289 - RNA, 19 nt, Artificial Sequence
  Description of Artificial Sequence:  siNA antisense region
cugcgccgccgggcugcgc

SEQ ID NO: 290 - RNA, 19 nt, Artificial Sequence
  Description of Artificial Sequence:  siNA antisense region
uggcgcggccggccuuacc

SEQ ID NO: 291 - RNA, 19 nt, Artificial Sequence
  Description of Artificial Sequence:  siNA antisense region
agcccaccggguccaccau

SEQ ID NO: 292 - RNA, 19 nt, Artificial Sequence
  Description of Artificial Sequence:  siNA antisense region
ccuuccacgccuccgcgaa

SEQ ID NO: 293 - RNA, 19 nt, Artificial Sequence
  Description of Artificial Sequence:  siNA antisense region
cugaguccgggaacugcgc

SEQ ID NO: 294 - RNA, 19 nt, Artificial Sequence
  Description of Artificial Sequence:  siNA antisense region
gcuccaugcgcgggggcuc

SEQ ID NO: 295 - RNA, 19 nt, Artificial Sequence
  Description of Artificial Sequence:  siNA antisense region
ugucgcccacugagcgcag

SEQ ID NO: 296 - RNA, 19 nt, Artificial Sequence
  Description of Artificial Sequence:  siNA antisense region
gcuccagcuccugcucgau

SEQ ID NO: 297 - RNA, 19 nt, Artificial Sequence
  Description of Artificial Sequence:  siNA antisense region
gaauggaggccuugcagcg

SEQ ID NO: 298 - RNA, 19 nt, Artificial Sequence
  Description of Artificial Sequence:  siNA antisense region
ccuccugcuccaggcgccg

SEQ ID NO: 299 - RNA, 19 nt, Artificial Sequence
  Description of Artificial Sequence:  siNA antisense region
ggaagcgcuccugguucac

SEQ ID NO: 300 - RNA, 19 nt, Artificial Sequence
  Description of Artificial Sequence:  siNA antisense region
ucugcagguagaucaugcg

SEQ ID NO: 301 - RNA, 19 nt, Artificial Sequence
  Description of Artificial Sequence:  siNA antisense region
uuuccuuggccagcaacgu

SEQ ID NO: 302 - RNA, 19 nt, Artificial Sequence
  Description of Artificial Sequence:  siNA antisense region
gccggucauagcucuucuu

SEQ ID NO: 303 - RNA, 19 nt, Artificial Sequence
  Description of Artificial Sequence:  siNA antisense region
gccggaagccccaucgcug

SEQ ID NO: 304 - RNA, 19 nt, Artificial Sequence
  Description of Artificial Sequence:  siNA antisense region
cgggggccugcgccgcgcg

SEQ ID NO: 305 - RNA, 19 nt, Artificial Sequence
  Description of Artificial Sequence:  siNA antisense region
ggggcucggaggcgccguc

SEQ ID NO: 306 - RNA, 19 nt, Artificial Sequence
  Description of Artificial Sequence:  siNA antisense region
ggcgcgacgcggacgcucg

SEQ ID NO: 307 - RNA, 19 nt, Artificial Sequence
  Description of Artificial Sequence:  siNA antisense region
cggcgggcgcuggcugcgg

SEQ ID NO: 308 - RNA, 19 nt, Artificial Sequence
  Description of Artificial Sequence:  siNA antisense region
gcggcgggucggcuccguc

SEQ ID NO: 309 - RNA, 19 nt, Artificial Sequence
  Description of Artificial Sequence:  siNA antisense region
ccucgggcuccucggcggg

SEQ ID NO: 310 - RNA, 19 nt, Artificial Sequence
  Description of Artificial Sequence:  siNA antisense region
ccucgccgucgggccgggc

SEQ ID NO: 311 - RNA, 19 nt, Artificial Sequence
  Description of Artificial Sequence:  siNA antisense region
uggccuuacccggagaacc

SEQ ID NO: 312 - RNA, 19 nt, Artificial Sequence
  Description of Artificial Sequence:  siNA antisense region
ugcgggcggucccgggccu

SEQ ID NO: 313 - RNA, 19 nt, Artificial Sequence
  Description of Artificial Sequence:  siNA antisense region
acgcggcugccccgggccu

SEQ ID NO: 314 - RNA, 19 nt, Artificial Sequence
  Description of Artificial Sequence:  siNA antisense region
ggucgucccguucccccga

SEQ ID NO: 315 - RNA, 19 nt, Artificial Sequence
  Description of Artificial Sequence:  siNA antisense region
cgcuggcgggggguccccg

SEQ ID NO: 316 - RNA, 19 nt, Artificial Sequence
  Description of Artificial Sequence:  siNA antisense region
uggaccugagcgccgccac

SEQ ID NO: 317 - RNA, 19 nt, Artificial Sequence
  Description of Artificial Sequence:  siNA antisense region
ugcggauccgcucgaaguu

SEQ ID NO: 318 - RNA, 19 nt, Artificial Sequence
  Description of Artificial Sequence:  siNA antisense region
cgggcuggccauggcccuu

SEQ ID NO: 319 - RNA, 19 nt, Artificial Sequence
  Description of Artificial Sequence:  siNA antisense region
gcuucucggcguccgcccc

SEQ ID NO: 320 - RNA, 19 nt, Artificial Sequence
  Description of Artificial Sequence:  siNA antisense region
cgacguucacguagaaggg

SEQ ID NO: 321 - RNA, 19 nt, Artificial Sequence
  Description of Artificial Sequence:  siNA antisense region
cgcgcucguggugaaacuc

SEQ ID NO: 322 - RNA, 19 nt, Artificial Sequence
  Description of Artificial Sequence:  siNA antisense region
cguugaccuucaccaggcc

SEQ ID NO: 323 - RNA, 19 nt, Artificial Sequence
  Description of Artificial Sequence:  siNA antisense region
gguccgacaccucuuuguc

SEQ ID NO: 324 - RNA, 19 nt, Artificial Sequence
  Description of Artificial Sequence:  siNA antisense region
ugcccagggagcugaugcg

SEQ ID NO: 325 - RNA, 19 nt, Artificial Sequence
  Description of Artificial Sequence:  siNA antisense region
ccaucugcauggccuggcu

SEQ ID NO: 326 - RNA, 19 nt, Artificial Sequence
  Description of Artificial Sequence:  siNA antisense region
gcugggacuuuuugcgcuc

SEQ ID NO: 327 - RNA, 19 nt, Artificial Sequence
  Description of Artificial Sequence:  siNA antisense region
cgcucgagcccgcgccgug

SEQ ID NO: 328 - RNA, 19 nt, Artificial Sequence
  Description of Artificial Sequence:  siNA antisense region
gccuggaugcaucccccac

SEQ ID NO: 329 - RNA, 19 nt, Artificial Sequence
  Description of Artificial Sequence:  siNA antisense region
agcguccccgguaaggggg

SEQ ID NO: 330 - RNA, 19 nt, Artificial Sequence
  Description of Artificial Sequence:  siNA antisense region
cgcagcugcucuccgagga

SEQ ID NO: 331 - RNA, 19 nt, Artificial Sequence
  Description of Artificial Sequence:  siNA antisense region
cguagucgccgucgacgcc

SEQ ID NO: 332 - RNA, 19 nt, Artificial Sequence
  Description of Artificial Sequence:  siNA antisense region
gguucaacucggcguccuc

SEQ ID NO: 333 - RNA, 19 nt, Artificial Sequence
  Description of Artificial Sequence:  siNA antisense region
uguccuucaggaagcgggg

SEQ ID NO: 334 - RNA, 19 nt, Artificial Sequence
  Description of Artificial Sequence:  siNA antisense region
cauuggcgucgaucagguu

SEQ ID NO: 335 - RNA, 19 nt, Artificial Sequence
  Description of Artificial Sequence:  siNA antisense region
aagggggccugcuaccgcc

SEQ ID NO: 336 - RNA, 19 nt, Artificial Sequence
  Description of Artificial Sequence:  siNA antisense region
gguacuccaggggcggcca

SEQ ID NO: 337 - RNA, 19 nt, Artificial Sequence
  Description of Artificial Sequence:  siNA antisense region
agaugcucugguagggcug

SEQ ID NO: 338 - RNA, 19 nt, Artificial Sequence
  Description of Artificial Sequence:  siNA antisense region
ccaucaugcccccgacgua

SEQ ID NO: 339 - RNA, 19 nt, Artificial Sequence
  Description of Artificial Sequence:  siNA antisense region
ggcccuugcccuccccuuc

SEQ ID NO: 340 - RNA, 19 nt, Artificial Sequence
  Description of Artificial Sequence:  siNA antisense region
ucuggcugcgcaggagcgg

SEQ ID NO: 341 - RNA, 19 nt, Artificial Sequence
  Description of Artificial Sequence:  siNA antisense region
ucuccugcucagaggugcu

SEQ ID NO: 342 - RNA, 19 nt, Artificial Sequence
  Description of Artificial Sequence:  siNA antisense region
ggggccagguaaggcgcuu

SEQ ID NO: 343 - RNA, 19 nt, Artificial Sequence
  Description of Artificial Sequence:  siNA antisense region
ggggggaguaggaccugcg

SEQ ID NO: 344 - RNA, 19 nt, Artificial Sequence
  Description of Artificial Sequence:  siNA antisense region
cgcaauccucaaaacuccg

SEQ ID NO: 345 - RNA, 19 nt, Artificial Sequence
  Description of Artificial Sequence:  siNA antisense region
ccgggguauagccgccucc

SEQ ID NO: 346 - RNA, 19 nt, Artificial Sequence
  Description of Artificial Sequence:  siNA antisense region
ucucauuggagcugcaguc

SEQ ID NO: 347 - RNA, 19 nt, Artificial Sequence
  Description of Artificial Sequence:  siNA antisense region
ccucgcuggaggugagguu

SEQ ID NO: 348 - RNA, 19 nt, Artificial Sequence
  Description of Artificial Sequence:  siNA antisense region
ggccagaggagaaguccuc

SEQ ID NO: 349 - RNA, 19 nt, Artificial Sequence
  Description of Artificial Sequence:  siNA antisense region
gggacacgcggcuggacug

SEQ ID NO: 350 - RNA, 19 nt, Artificial Sequence
  Description of Artificial Sequence:  siNA antisense region
gguaggugguggggcuugg

SEQ ID NO: 351 - RNA, 19 nt, Artificial Sequence
  Description of Artificial Sequence:  siNA antisense region
uuuugucccggaacaugcg

SEQ ID NO: 352 - RNA, 19 nt, Artificial Sequence
  Description of Artificial Sequence:  siNA antisense region
ucugcgagggagagcggcu

SEQ ID NO: 353 - RNA, 19 nt, Artificial Sequence
  Description of Artificial Sequence:  siNA antisense region
cgaaggacuguugcgaguu

SEQ ID NO: 354 - RNA, 19 nt, Artificial Sequence
  Description of Artificial Sequence:  siNA antisense region
uggggggacugcugcuguc

SEQ ID NO: 355 - RNA, 19 nt, Artificial Sequence
  Description of Artificial Sequence:  siNA antisense region
gcuuauggcacugcggcgu

SEQ ID NO: 356 - RNA, 19 nt, Artificial Sequence
  Description of Artificial Sequence:  siNA antisense region
ccgggcagugccggugccg

SEQ ID NO: 357 - RNA, 19 nt, Artificial Sequence
  Description of Artificial Sequence:  siNA antisense region
uggccucggacacgacaac

SEQ ID NO: 358 - RNA, 19 nt, Artificial Sequence
  Description of Artificial Sequence:  siNA antisense region
ugcggacgcccacgauggu

SEQ ID NO: 359 - RNA, 19 nt, Artificial Sequence
  Description of Artificial Sequence:  siNA antisense region
gccagaucugcccggucuu

SEQ ID NO: 360 - RNA, 19 nt, Artificial Sequence
  Description of Artificial Sequence:  siNA antisense region
cgcccucgccaucguuggg

SEQ ID NO: 361 - RNA, 19 nt, Artificial Sequence
  Description of Artificial Sequence:  siNA antisense region
cugcgucuccauggaaggc

SEQ ID NO: 362 - RNA, 19 nt, Artificial Sequence
  Description of Artificial Sequence:  siNA antisense region
guguuccgaacgagccauc

SEQ ID NO: 363 - RNA, 19 nt, Artificial Sequence
  Description of Artificial Sequence:  siNA antisense region
cgcagccguauccaggugg

SEQ ID NO: 364 - RNA, 19 nt, Artificial Sequence
  Description of Artificial Sequence:  siNA antisense region
ccucugcccggucugcagc

SEQ ID NO: 365 - RNA, 19 nt, Artificial Sequence
  Description of Artificial Sequence:  siNA antisense region
cuuggugccggcgcugcuc

SEQ ID NO: 366 - RNA, 19 nt, Artificial Sequence
  Description of Artificial Sequence:  siNA antisense region
caauguagggcagcccauc

SEQ ID NO: 367 - RNA, 19 nt, Artificial Sequence
  Description of Artificial Sequence:  siNA antisense region
augaggagggcgagucauc

SEQ ID NO: 368 - RNA, 19 nt, Artificial Sequence
  Description of Artificial Sequence:  siNA antisense region
ugcugcugagguggggcga

SEQ ID NO: 369 - RNA, 19 nt, Artificial Sequence
  Description of Artificial Sequence:  siNA antisense region
cccggcugccccugcccuu

SEQ ID NO: 370 - RNA, 19 nt, Artificial Sequence
  Description of Artificial Sequence:  siNA antisense region
cucccgagaccagcgcauc

SEQ ID NO: 371 - RNA, 19 nt, Artificial Sequence
  Description of Artificial Sequence:  siNA antisense region
cuuuaguggacuccagggc

SEQ ID NO: 372 - RNA, 19 nt, Artificial Sequence
  Description of Artificial Sequence:  siNA antisense region
ccaaguccagcucacucgc

SEQ ID NO: 373 - RNA, 19 nt, Artificial Sequence
  Description of Artificial Sequence:  siNA antisense region
ucaucuccaagcccuuuuc

SEQ ID NO: 374 - RNA, 19 nt, Artificial Sequence
  Description of Artificial Sequence:  siNA antisense region
ccgacaggacccauuuucu

SEQ ID NO: 375 - RNA, 19 nt, Artificial Sequence
  Description of Artificial Sequence:  siNA antisense region
ccucgcuagccaggauucc

SEQ ID NO: 376 - RNA, 19 nt, Artificial Sequence
  Description of Artificial Sequence:  siNA antisense region
gguggcucagguaagucuc

SEQ ID NO: 377 - RNA, 19 nt, Artificial Sequence
  Description of Artificial Sequence:  siNA antisense region
gcagcagcagugccuccag

SEQ ID NO: 378 - RNA, 19 nt, Artificial Sequence
  Description of Artificial Sequence:  siNA antisense region
cuuucaaaggcuucauggg

SEQ ID NO: 379 - RNA, 19 nt, Artificial Sequence
  Description of Artificial Sequence:  siNA antisense region
gagaggugguggcagcggc

SEQ ID NO: 380 - RNA, 19 nt, Artificial Sequence
  Description of Artificial Sequence:  siNA antisense region
gacucgucagcaccggcug

SEQ ID NO: 381 - RNA, 19 nt, Artificial Sequence
  Description of Artificial Sequence:  siNA antisense region
agauggucucgaucugcug

SEQ ID NO: 382 - RNA, 19 nt, Artificial Sequence
  Description of Artificial Sequence:  siNA antisense region
gcucaggcacuuugaagaa

SEQ ID NO: 383 - RNA, 19 nt, Artificial Sequence
  Description of Artificial Sequence:  siNA antisense region
ccuuguggaucucguagag

SEQ ID NO: 384 - RNA, 19 nt, Artificial Sequence
  Description of Artificial Sequence:  siNA antisense region
agagcccaucauagaacuc

SEQ ID NO: 385 - RNA, 19 nt, Artificial Sequence
  Description of Artificial Sequence:  siNA antisense region
acugcugcacgcgggggaa

SEQ ID NO: 386 - RNA, 19 nt, Artificial Sequence
  Description of Artificial Sequence:  siNA antisense region
cccgcugcugguggcucca

SEQ ID NO: 387 - RNA, 19 nt, Artificial Sequence
  Description of Artificial Sequence:  siNA antisense region
ucuggaagaggucgcccac

SEQ ID NO: 388 - RNA, 19 nt, Artificial Sequence
  Description of Artificial Sequence:  siNA antisense region
ccagcuggcuggccagcuu

SEQ ID NO: 389 - RNA, 19 nt, Artificial Sequence
  Description of Artificial Sequence:  siNA antisense region
cgaaggcccgguacacacc

SEQ ID NO: 390 - RNA, 19 nt, Artificial Sequence
  Description of Artificial Sequence:  siNA antisense region
caacuccguaguuguccac

SEQ ID NO: 391 - RNA, 19 nt, Artificial Sequence
  Description of Artificial Sequence:  siNA antisense region
ucucagccauuuccauggc

SEQ ID NO: 392 - RNA, 19 nt, Artificial Sequence
  Description of Artificial Sequence:  siNA antisense region
cauuggccugacagcacuu

SEQ ID NO: 393 - RNA, 19 nt, Artificial Sequence
  Description of Artificial Sequence:  siNA antisense region
agauuucugcaaacugagc

SEQ ID NO: 394 - RNA, 19 nt, Artificial Sequence
  Description of Artificial Sequence:  siNA antisense region
uggcucucagguucucgga

SEQ ID NO: 395 - RNA, 19 nt, Artificial Sequence
  Description of Artificial Sequence:  siNA antisense region
uggcaucuuuguugcuucu

SEQ ID NO: 396 - RNA, 19 nt, Artificial Sequence
  Description of Artificial Sequence:  siNA antisense region
ucuuggucguuggauccuu

SEQ ID NO: 397 - RNA, 19 nt, Artificial Sequence
  Description of Artificial Sequence:  siNA antisense region
gcagaguuuccagagaguu

SEQ ID NO: 398 - RNA, 19 nt, Artificial Sequence
  Description of Artificial Sequence:  siNA antisense region
gguccacaggcuuguagag

SEQ ID NO: 399 - RNA, 19 nt, Artificial Sequence
  Description of Artificial Sequence:  siNA antisense region
gcgugcuccucgucacacg

SEQ ID NO: 400 - RNA, 19 nt, Artificial Sequence
  Description of Artificial Sequence:  siNA antisense region
gcaagucauggaggaccag

SEQ ID NO: 401 - RNA, 19 nt, Artificial Sequence
  Description of Artificial Sequence:  siNA antisense region
uggcaggagugugcuucag

SEQ ID NO: 402 - RNA, 19 nt, Artificial Sequence
  Description of Artificial Sequence:  siNA antisense region
agggguggucaggguggcu

SEQ ID NO: 403 - RNA, 19 nt, Artificial Sequence
  Description of Artificial Sequence:  siNA antisense region
ggagggcguccugcagcaa

SEQ ID NO: 404 - RNA, 19 nt, Artificial Sequence
  Description of Artificial Sequence:  siNA antisense region
ggaaguucugugagaugcg

SEQ ID NO: 405 - RNA, 19 nt, Artificial Sequence
  Description of Artificial Sequence:  siNA antisense region
ccucauugaugcuggacag

SEQ ID NO: 406 - RNA, 19 nt, Artificial Sequence
  Description of Artificial Sequence:  siNA antisense region
gccgucggggugugaucuc

SEQ ID NO: 407 - RNA, 19 nt, Artificial Sequence
  Description of Artificial Sequence:  siNA antisense region
ucuucaccgucauggacug

SEQ ID NO: 408 - RNA, 19 nt, Artificial Sequence
  Description of Artificial Sequence:  siNA antisense region
gcugccggugcucucccuu

SEQ ID NO: 409 - RNA, 19 nt, Artificial Sequence
  Description of Artificial Sequence:  siNA antisense region
ugaagcuguccuucagcag

SEQ ID NO: 410 - RNA, 19 nt, Artificial Sequence
  Description of Artificial Sequence:  siNA antisense region
ccuccaccagcuccaccau

SEQ ID NO: 411 - RNA, 19 nt, Artificial Sequence
  Description of Artificial Sequence:  siNA antisense region
ggcgcagcuugcgggcccc

SEQ ID NO: 412 - RNA, 19 nt, Artificial Sequence
  Description of Artificial Sequence:  siNA antisense region
cggugaacaggaagacgug

SEQ ID NO: 413 - RNA, 19 nt, Artificial Sequence
  Description of Artificial Sequence:  siNA antisense region
uggugcagagaagcagcuc

SEQ ID NO: 414 - RNA, 19 nt, Artificial Sequence
  Description of Artificial Sequence:  siNA antisense region
cgcucugcuucuugagcuu

SEQ ID NO: 415 - RNA, 19 nt, Artificial Sequence
  Description of Artificial Sequence:  siNA antisense region
acugcugcguuuugccucc

SEQ ID NO: 416 - RNA, 19 nt, Artificial Sequence
  Description of Artificial Sequence:  siNA antisense region
uguaccauuugcagucaua

SEQ ID NO: 417 - RNA, 19 nt, Artificial Sequence
  Description of Artificial Sequence:  siNA antisense region
ugagauccgugagcggaau

SEQ ID NO: 418 - RNA, 19 nt, Artificial Sequence
  Description of Artificial Sequence:  siNA antisense region
cauccaccaucuggaagcu

SEQ ID NO: 419 - RNA, 19 nt, Artificial Sequence
  Description of Artificial Sequence:  siNA antisense region
ugggcacugccuccaguuc

SEQ ID NO: 420 - RNA, 19 nt, Artificial Sequence
  Description of Artificial Sequence:  siNA antisense region
cgggcaccagggggauguu

SEQ ID NO: 421 - RNA, 19 nt, Artificial Sequence
  Description of Artificial Sequence:  siNA antisense region
aagcguccagcuccucauc

SEQ ID NO: 422 - RNA, 19 nt, Artificial Sequence
  Description of Artificial Sequence:  siNA antisense region
gggagaucuugaucuucaa

SEQ ID NO: 423 - RNA, 19 nt, Artificial Sequence
  Description of Artificial Sequence:  siNA antisense region
ggaugucacucuugaucug

SEQ ID NO: 424 - RNA, 19 nt, Artificial Sequence
  Description of Artificial Sequence:  siNA antisense region
ucgcccucuucucucucug

SEQ ID NO: 425 - RNA, 19 nt, Artificial Sequence
  Description of Artificial Sequence:  siNA antisense region
uagccuugcugcccuuguu

SEQ ID NO: 426 - RNA, 19 nt, Artificial Sequence
  Description of Artificial Sequence:  siNA antisense region
ucuucuucagccucuccgu

SEQ ID NO: 427 - RNA, 19 nt, Artificial Sequence
  Description of Artificial Sequence:  siNA antisense region
acuccugcuccgacagcuu

SEQ ID NO: 428 - RNA, 19 nt, Artificial Sequence
  Description of Artificial Sequence:  siNA antisense region
acauaagcagcagcaguga

SEQ ID NO: 429 - RNA, 19 nt, Artificial Sequence
  Description of Artificial Sequence:  siNA antisense region
ugaaggccaugcugggaga

SEQ ID NO: 430 - RNA, 19 nt, Artificial Sequence
  Description of Artificial Sequence:  siNA antisense region
cguugcggcugugcacccu

SEQ ID NO: 431 - RNA, 19 nt, Artificial Sequence
  Description of Artificial Sequence:  siNA antisense region
ggaacguguaacucuugcc

SEQ ID NO: 432 - RNA, 19 nt, Artificial Sequence
  Description of Artificial Sequence:  siNA antisense region
cauagucagaggagaucag

SEQ ID NO: 433 - RNA, 19 nt, Artificial Sequence
  Description of Artificial Sequence:  siNA antisense region
cccuccacucugcacgcuc

SEQ ID NO: 434 - RNA, 19 nt, Artificial Sequence
  Description of Artificial Sequence:  siNA antisense region
gcugcucccggauguucuc

SEQ ID NO: 435 - RNA, 19 nt, Artificial Sequence
  Description of Artificial Sequence:  siNA antisense region
uucugaaacacuucuucug

SEQ ID NO: 436 - RNA, 19 nt, Artificial Sequence
  Description of Artificial Sequence:  siNA antisense region
cggaugucagggagaagcu

SEQ ID NO: 437 - RNA, 19 nt, Artificial Sequence
  Description of Artificial Sequence:  siNA antisense region
ucagcaucugcagcuccac

SEQ ID NO: 438 - RNA, 19 nt, Artificial Sequence
  Description of Artificial Sequence:  siNA antisense region
guuucacacacgaguuggu

SEQ ID NO: 439 - RNA, 19 nt, Artificial Sequence
  Description of Artificial Sequence:  siNA antisense region
ugcuguggacagucuggag

SEQ ID NO: 440 - RNA, 19 nt, Artificial Sequence
  Description of Artificial Sequence:  siNA antisense region
uauugauggucagcggaau

SEQ ID NO: 441 - RNA, 19 nt, Artificial Sequence
  Description of Artificial Sequence:  siNA antisense region
gagacucaucaucuuccuu

SEQ ID NO: 442 - RNA, 19 nt, Artificial Sequence
  Description of Artificial Sequence:  siNA antisense region
gaaacccauagagccccgg

SEQ ID NO: 443 - RNA, 19 nt, Artificial Sequence
  Description of Artificial Sequence:  siNA antisense region
aguggacgaugacauucag

SEQ ID NO: 444 - RNA, 19 nt, Artificial Sequence
  Description of Artificial Sequence:  siNA antisense region
gcuuaaauccaguggcuga

SEQ ID NO: 445 - RNA, 19 nt, Artificial Sequence
  Description of Artificial Sequence:  siNA antisense region
aguacagauuugaacucug

SEQ ID NO: 446 - RNA, 19 nt, Artificial Sequence
  Description of Artificial Sequence:  siNA antisense region
aauccaccuccagggugca

SEQ ID NO: 447 - RNA, 19 nt, Artificial Sequence
  Description of Artificial Sequence:  siNA antisense region
ucacaaaauacccaaagga

SEQ ID NO: 448 - RNA, 19 nt, Artificial Sequence
  Description of Artificial Sequence:  siNA antisense region
cgcgcgucuuugcuuuauu

SEQ ID NO: 449 - RNA, 19 nt, Artificial Sequence
  Description of Artificial Sequence:  siNA antisense region
cagcugugucccuguagac

SEQ ID NO: 450 - RNA, 19 nt, Artificial Sequence
  Description of Artificial Sequence:  siNA antisense region
ccucguuccaguuuggcuc

SEQ ID NO: 451 - RNA, 19 nt, Artificial Sequence
  Description of Artificial Sequence:  siNA antisense region
ccagcucuaucucaaauuc

SEQ ID NO: 452 - RNA, 19 nt, Artificial Sequence
  Description of Artificial Sequence:  siNA antisense region
ucagggucugggagcccuc

SEQ ID NO: 453 - RNA, 19 nt, Artificial Sequence
  Description of Artificial Sequence:  siNA antisense region
uuucauagcacaguauccu

SEQ ID NO: 454 - RNA, 19 nt, Artificial Sequence
  Description of Artificial Sequence:  siNA antisense region
ucgucuuguuguaacacuu

SEQ ID NO: 455 - RNA, 19 nt, Artificial Sequence
  Description of Artificial Sequence:  siNA antisense region
cguccuccuuggggaucuu

SEQ ID NO: 456 - RNA, 19 nt, Artificial Sequence
  Description of Artificial Sequence:  siNA antisense region
gucuguccgugcucucgcc

SEQ ID NO: 457 - RNA, 19 nt, Artificial Sequence
  Description of Artificial Sequence:  siNA antisense region
ccuggcccuuccccaugag

SEQ ID NO: 458 - RNA, 19 nt, Artificial Sequence
  Description of Artificial Sequence:  siNA antisense region
ccugcggguccagcuggac

SEQ ID NO: 459 - RNA, 19 nt, Artificial Sequence
  Description of Artificial Sequence:  siNA antisense region
agucucuguccugcagggc

SEQ ID NO: 460 - RNA, 19 nt, Artificial Sequence
  Description of Artificial Sequence:  siNA antisense region
cgaugacggugcgcugcca

SEQ ID NO: 461 - RNA, 19 nt, Artificial Sequence
  Description of Artificial Sequence:  siNA antisense region
cuucgaucccauucauggc

SEQ ID NO: 462 - RNA, 19 nt, Artificial Sequence
  Description of Artificial Sequence:  siNA antisense region
acuugaccgagagcuuuac

SEQ ID NO: 463 - RNA, 19 nt, Artificial Sequence
  Description of Artificial Sequence:  siNA antisense region
ugaacucccugcuguugaa

SEQ ID NO: 464 - RNA, 19 nt, Artificial Sequence
  Description of Artificial Sequence:  siNA antisense region
acggcauccucuucaagcu

SEQ ID NO: 465 - RNA, 19 nt, Artificial Sequence
  Description of Artificial Sequence:  siNA antisense region
ccccugucuguuuucggga

SEQ ID NO: 466 - RNA, 19 nt, Artificial Sequence
  Description of Artificial Sequence:  siNA antisense region
caaucuugacuccgaagac

SEQ ID NO: 467 - RNA, 19 nt, Artificial Sequence
  Description of Artificial Sequence:  siNA antisense region
cucucuuggugaccacagc

SEQ ID NO: 468 - RNA, 19 nt, Artificial Sequence
  Description of Artificial Sequence:  siNA antisense region
agggcaccuuggaccucuc

SEQ ID NO: 469 - RNA, 19 nt, Artificial Sequence
  Description of Artificial Sequence:  siNA antisense region
cgcacuggcgcacgaugua

SEQ ID NO: 470 - RNA, 19 nt, Artificial Sequence
  Description of Artificial Sequence:  siNA antisense region
ggcgcucgaucuccuccac

SEQ ID NO: 471 - RNA, 19 nt, Artificial Sequence
  Description of Artificial Sequence:  siNA antisense region
ccaccuccuccaugccucg

SEQ ID NO: 472 - RNA, 19 nt, Artificial Sequence
  Description of Artificial Sequence:  siNA antisense region
cggacacgcgguagaugcc

SEQ ID NO: 473 - RNA, 19 nt, Artificial Sequence
  Description of Artificial Sequence:  siNA antisense region
ggauguccguggccacacc

SEQ ID NO: 474 - RNA, 19 nt, Artificial Sequence
  Description of Artificial Sequence:  siNA antisense region
aggcugccuucagugccug

SEQ ID NO: 475 - RNA, 19 nt, Artificial Sequence
  Description of Artificial Sequence:  siNA antisense region
ccuuguuauugacgucgaa

SEQ ID NO: 476 - RNA, 19 nt, Artificial Sequence
  Description of Artificial Sequence:  siNA antisense region
ucaucaucaccgacacauc

SEQ ID NO: 477 - RNA, 19 nt, Artificial Sequence
  Description of Artificial Sequence:  siNA antisense region
cguucacguccaucucgcu

SEQ ID NO: 478 - RNA, 19 nt, Artificial Sequence
  Description of Artificial Sequence:  siNA antisense region
ucagcgugccugcgauggc

SEQ ID NO: 479 - RNA, 19 nt, Artificial Sequence
  Description of Artificial Sequence:  siNA antisense region
gcucacggaaguacagcuu

SEQ ID NO: 480 - RNA, 19 nt, Artificial Sequence
  Description of Artificial Sequence:  siNA antisense region
ugaagaggggcucgggcag

SEQ ID NO: 481 - RNA, 19 nt, Artificial Sequence
  Description of Artificial Sequence:  siNA antisense region
ugggguagaacucgucagu

SEQ ID NO: 482 - RNA, 19 nt, Artificial Sequence
  Description of Artificial Sequence:  siNA antisense region
cgaugcccucugcgaaguu

SEQ ID NO: 483 - RNA, 19 nt, Artificial Sequence
  Description of Artificial Sequence:  siNA antisense region
caaccgggucugaaagagc

SEQ ID NO: 484 - RNA, 19 nt, Artificial Sequence
  Description of Artificial Sequence:  siNA antisense region
gcaugcagcucuccuuugc

SEQ ID NO: 485 - RNA, 19 nt, Artificial Sequence
  Description of Artificial Sequence:  siNA antisense region
gggacagcagcagguugag

SEQ ID NO: 486 - RNA, 19 nt, Artificial Sequence
  Description of Artificial Sequence:  siNA antisense region
gcagguuggccuccggcag

SEQ ID NO: 487 - RNA, 19 nt, Artificial Sequence
  Description of Artificial Sequence:  siNA antisense region
gaaggaaaaggaaggugag

SEQ ID NO: 488 - RNA, 19 nt, Artificial Sequence
  Description of Artificial Sequence:  siNA antisense region
cccuuuucaggugguccag

SEQ ID NO: 489 - RNA, 19 nt, Artificial Sequence
  Description of Artificial Sequence:  siNA antisense region
cugccuccuucucugccac

SEQ ID NO: 490 - RNA, 19 nt, Artificial Sequence
  Description of Artificial Sequence:  siNA antisense region
gcagggacaucuuauugac

SEQ ID NO: 491 - RNA, 19 nt, Artificial Sequence
  Description of Artificial Sequence:  siNA antisense region
agaccguggcgagguugug

SEQ ID NO: 492 - RNA, 19 nt, Artificial Sequence
  Description of Artificial Sequence:  siNA antisense region
ggagcagcguggggccaaa

SEQ ID NO: 493 - RNA, 19 nt, Artificial Sequence
  Description of Artificial Sequence:  siNA antisense region
ucuccuucucggagggccg

SEQ ID NO: 494 - RNA, 19 nt, Artificial Sequence
  Description of Artificial Sequence:  siNA antisense region
gguuggcagggagcuugcu

SEQ ID NO: 495 - RNA, 19 nt, Artificial Sequence
  Description of Artificial Sequence:  siNA antisense region
uggugauaggcuggcuggg

SEQ ID NO: 496 - RNA, 19 nt, Artificial Sequence
  Description of Artificial Sequence:  siNA antisense region
aggaccagcugucagucau

SEQ ID NO: 497 - RNA, 19 nt, Artificial Sequence
  Description of Artificial Sequence:  siNA antisense region
ccugggacaugaccuccaa

SEQ ID NO: 498 - RNA, 19 nt, Artificial Sequence
  Description of Artificial Sequence:  siNA antisense region
aguacagcagcaccuggac

SEQ ID NO: 499 - RNA, 19 nt, Artificial Sequence
  Description of Artificial Sequence:  siNA antisense region
uggccuccagcugcaggaa

SEQ ID NO: 500 - RNA, 19 nt, Artificial Sequence
  Description of Artificial Sequence:  siNA antisense region
ugcuguccggggcagggau

SEQ ID NO: 501 - RNA, 19 nt, Artificial Sequence
  Description of Artificial Sequence:  siNA antisense region
acaggaugcucugucucuu

SEQ ID NO: 502 - RNA, 19 nt, Artificial Sequence
  Description of Artificial Sequence:  siNA antisense region
uuuagacuucgguggagaa

SEQ ID NO: 503 - RNA, 19 nt, Artificial Sequence
  Description of Artificial Sequence:  siNA antisense region
aggagauggacugggaccu

SEQ ID NO: 504 - RNA, 19 nt, Artificial Sequence
  Description of Artificial Sequence:  siNA antisense region
ggccaucugucugccucca

SEQ ID NO: 505 - RNA, 19 nt, Artificial Sequence
  Description of Artificial Sequence:  siNA antisense region
auuagccagagguuuccag

SEQ ID NO: 506 - RNA, 19 nt, Artificial Sequence
  Description of Artificial Sequence:  siNA antisense region
cgcucuacggauggcccga

SEQ ID NO: 507 - RNA, 19 nt, Artificial Sequence
  Description of Artificial Sequence:  siNA antisense region
acaccucaggaagguuccc

SEQ ID NO: 508 - RNA, 19 nt, Artificial Sequence
  Description of Artificial Sequence:  siNA antisense region
cuuggggguggcccaagga

SEQ ID NO: 509 - RNA, 19 nt, Artificial Sequence
  Description of Artificial Sequence:  siNA antisense region
uuggcagauggcccaacac

SEQ ID NO: 510 - RNA, 19 nt, Artificial Sequence
  Description of Artificial Sequence:  siNA antisense region
gcuuugggucgcugucucu

SEQ ID NO: 511 - RNA, 19 nt, Artificial Sequence
  Description of Artificial Sequence:  siNA antisense region
caggccaccuguccuucgg

SEQ ID NO: 512 - RNA, 19 nt, Artificial Sequence
  Description of Artificial Sequence:  siNA antisense region
accugggcgagaucugccc

SEQ ID NO: 513 - RNA, 19 nt, Artificial Sequence
  Description of Artificial Sequence:  siNA antisense region
ccagccuggggcucccaga

SEQ ID NO: 514 - RNA, 19 nt, Artificial Sequence
  Description of Artificial Sequence:  siNA antisense region
aaaaaccacagucugaggc

SEQ ID NO: 515 - RNA, 19 nt, Artificial Sequence
  Description of Artificial Sequence:  siNA antisense region
cccucggguggccacauaa

SEQ ID NO: 516 - RNA, 19 nt, Artificial Sequence
  Description of Artificial Sequence:  siNA antisense region
augaacuggcuuggggcgc

SEQ ID NO: 517 - RNA, 19 nt, Artificial Sequence
  Description of Artificial Sequence:  siNA antisense region
ucaggccuggacucugaga

SEQ ID NO: 518 - RNA, 19 nt, Artificial Sequence
  Description of Artificial Sequence:  siNA antisense region
ucacccugucucccagggu

SEQ ID NO: 519 - RNA, 19 nt, Artificial Sequence
  Description of Artificial Sequence:  siNA antisense region
ucauaaaaaucacucccuu

SEQ ID NO: 520 - RNA, 19 nt, Artificial Sequence
  Description of Artificial Sequence:  siNA antisense region
uuagacucuaaguuaaguu

SEQ ID NO: 521 - RNA, 19 nt, Artificial Sequence
  Description of Artificial Sequence:  siNA antisense region
ugauccaguagaaaucuuu

SEQ ID NO: 522 - RNA, 19 nt, Artificial Sequence
  Description of Artificial Sequence:  siNA antisense region
agggcgcaucuugacaagu

SEQ ID NO: 523 - RNA, 19 nt, Artificial Sequence
  Description of Artificial Sequence:  siNA antisense region
guucccuucuccccagaga

SEQ ID NO: 524 - RNA, 19 nt, Artificial Sequence
  Description of Artificial Sequence:  siNA antisense region
gugagggaauccggucacg

SEQ ID NO: 525 - RNA, 19 nt, Artificial Sequence
  Description of Artificial Sequence:  siNA antisense region
uuuauucaagauacaacag

SEQ ID NO: 526 - RNA, 19 nt, Artificial Sequence
  Description of Artificial Sequence:  siNA antisense region
caggaugaagcagcagcgu

SEQ ID NO: 527 - RNA, 19 nt, Artificial Sequence
  Description of Artificial Sequence:  Target Sequence/siNA sense region
ccuucccccugcgaggauc

SEQ ID NO: 528 - RNA, 19 nt, Artificial Sequence
  Description of Artificial Sequence:  Target Sequence/siNA sense region
cgccguuggcccggguugg

SEQ ID NO: 529 - RNA, 19 nt, Artificial Sequence
  Description of Artificial Sequence:  Target Sequence/siNA sense region
gcuuuggaaagcggcggug

SEQ ID NO: 530 - RNA, 19 nt, Artificial Sequence
  Description of Artificial Sequence:  Target Sequence/siNA sense region
ggcuuugggccgggcucgg

SEQ ID NO: 531 - RNA, 19 nt, Artificial Sequence
  Description of Artificial Sequence:  Target Sequence/siNA sense region
gccucgggaacgccagggg

SEQ ID NO: 532 - RNA, 19 nt, Artificial Sequence
  Description of Artificial Sequence:  Target Sequence/siNA sense region
gccccugggugcggacggg

SEQ ID NO: 533 - RNA, 19 nt, Artificial Sequence
  Description of Artificial Sequence:  Target Sequence/siNA sense region
gcgcggccaggaggggguu

SEQ ID NO: 534 - RNA, 19 nt, Artificial Sequence
  Description of Artificial Sequence:  Target Sequence/siNA sense region
uaaggcgcaggcggcggcg

SEQ ID NO: 535 - RNA, 19 nt, Artificial Sequence
  Description of Artificial Sequence:  Target Sequence/siNA sense region
ggggcgggggcgggccugg

SEQ ID NO: 536 - RNA, 19 nt, Artificial Sequence
  Description of Artificial Sequence:  Target Sequence/siNA sense region
gcgggcgcccucuccgggc

SEQ ID NO: 537 - RNA, 19 nt, Artificial Sequence
  Description of Artificial Sequence:  Target Sequence/siNA sense region
cccuuuguuaacaggcgcg

SEQ ID NO: 538 - RNA, 19 nt, Artificial Sequence
  Description of Artificial Sequence:  Target Sequence/siNA sense region
gucccggccagcggagacg

SEQ ID NO: 539 - RNA, 19 nt, Artificial Sequence
  Description of Artificial Sequence:  Target Sequence/siNA sense region
gcggccgcccugggcgggc

SEQ ID NO: 540 - RNA, 19 nt, Artificial Sequence
  Description of Artificial Sequence:  Target Sequence/siNA sense region
cgcgggcggcgggcggcgg

SEQ ID NO: 541 - RNA, 19 nt, Artificial Sequence
  Description of Artificial Sequence:  Target Sequence/siNA sense region
gugagggcggccugcgggg

SEQ ID NO: 542 - RNA, 19 nt, Artificial Sequence
  Description of Artificial Sequence:  Target Sequence/siNA sense region
gcggcgcccgggggccggg

SEQ ID NO: 543 - RNA, 19 nt, Artificial Sequence
  Description of Artificial Sequence:  Target Sequence/siNA sense region
gccgagccgggccugagcc

SEQ ID NO: 544 - RNA, 19 nt, Artificial Sequence
  Description of Artificial Sequence:  Target Sequence/siNA sense region
cgggcccggaccgagcugg

SEQ ID NO: 545 - RNA, 19 nt, Artificial Sequence
  Description of Artificial Sequence:  Target Sequence/siNA sense region
ggagaggggcuccggcccg

SEQ ID NO: 546 - RNA, 19 nt, Artificial Sequence
  Description of Artificial Sequence:  Target Sequence/siNA sense region
gaucguucgcuuggcgcaa

SEQ ID NO: 547 - RNA, 19 nt, Artificial Sequence
  Description of Artificial Sequence:  Target Sequence/siNA sense region
aaauguuggagaucugccu

SEQ ID NO: 548 - RNA, 19 nt, Artificial Sequence
  Description of Artificial Sequence:  Target Sequence/siNA sense region
ugaagcuggugggcugcaa

SEQ ID NO: 549 - RNA, 19 nt, Artificial Sequence
  Description of Artificial Sequence:  Target Sequence/siNA sense region
aauccaagaaggggcuguc

SEQ ID NO: 550 - RNA, 19 nt, Artificial Sequence
  Description of Artificial Sequence:  Target Sequence/siNA sense region
ccucguccuccagcuguua

SEQ ID NO: 551 - RNA, 19 nt, Artificial Sequence
  Description of Artificial Sequence:  Target Sequence/siNA sense region
aucuggaagaagcccuuca

SEQ ID NO: 552 - RNA, 19 nt, Artificial Sequence
  Description of Artificial Sequence:  Target Sequence/siNA sense region
agcggccaguagcaucuga

SEQ ID NO: 553 - RNA, 19 nt, Artificial Sequence
  Description of Artificial Sequence:  Target Sequence/siNA sense region
acuuugagccucagggucu

SEQ ID NO: 554 - RNA, 19 nt, Artificial Sequence
  Description of Artificial Sequence:  Target Sequence/siNA sense region
ugagugaagccgcucguug

SEQ ID NO: 555 - RNA, 19 nt, Artificial Sequence
  Description of Artificial Sequence:  Target Sequence/siNA sense region
ggaacuccaaggaaaaccu

SEQ ID NO: 556 - RNA, 19 nt, Artificial Sequence
  Description of Artificial Sequence:  Target Sequence/siNA sense region
uucucgcuggacccaguga

SEQ ID NO: 557 - RNA, 19 nt, Artificial Sequence
  Description of Artificial Sequence:  Target Sequence/siNA sense region
aaaaugaccccaaccuuuu

SEQ ID NO: 558 - RNA, 19 nt, Artificial Sequence
  Description of Artificial Sequence:  Target Sequence/siNA sense region
ucguugcacuguaugauuu

SEQ ID NO: 559 - RNA, 19 nt, Artificial Sequence
  Description of Artificial Sequence:  Target Sequence/siNA sense region
uuguggccaguggagauaa

SEQ ID NO: 560 - RNA, 19 nt, Artificial Sequence
  Description of Artificial Sequence:  Target Sequence/siNA sense region
acacucuaagcauaacuaa

SEQ ID NO: 561 - RNA, 19 nt, Artificial Sequence
  Description of Artificial Sequence:  Target Sequence/siNA sense region
aaggugaaaagcuccgggu

SEQ ID NO: 562 - RNA, 19 nt, Artificial Sequence
  Description of Artificial Sequence:  Target Sequence/siNA sense region
ucuuaggcuauaaucacaa

SEQ ID NO: 563 - RNA, 19 nt, Artificial Sequence
  Description of Artificial Sequence:  Target Sequence/siNA sense region
auggggaauggugugaagc

SEQ ID NO: 564 - RNA, 19 nt, Artificial Sequence
  Description of Artificial Sequence:  Target Sequence/siNA sense region
cccaaaccaaaaauggcca

SEQ ID NO: 565 - RNA, 19 nt, Artificial Sequence
  Description of Artificial Sequence:  Target Sequence/siNA sense region
aaggcugggucccaagcaa

SEQ ID NO: 566 - RNA, 19 nt, Artificial Sequence
  Description of Artificial Sequence:  Target Sequence/siNA sense region
acuacaucacgccagucaa

SEQ ID NO: 567 - RNA, 19 nt, Artificial Sequence
  Description of Artificial Sequence:  Target Sequence/siNA sense region
acagucuggagaaacacuc

SEQ ID NO: 568 - RNA, 19 nt, Artificial Sequence
  Description of Artificial Sequence:  Target Sequence/siNA sense region
ccugguaccaugggccugu

SEQ ID NO: 569 - RNA, 19 nt, Artificial Sequence
  Description of Artificial Sequence:  Target Sequence/siNA sense region
ugucccgcaaugccgcuga

SEQ ID NO: 570 - RNA, 19 nt, Artificial Sequence
  Description of Artificial Sequence:  Target Sequence/siNA sense region
aguauccgcugagcagcgg

SEQ ID NO: 571 - RNA, 19 nt, Artificial Sequence
  Description of Artificial Sequence:  Target Sequence/siNA sense region
ggaucaauggcagcuucuu

SEQ ID NO: 572 - RNA, 19 nt, Artificial Sequence
  Description of Artificial Sequence:  Target Sequence/siNA sense region
uggugcgugagagugagag

SEQ ID NO: 573 - RNA, 19 nt, Artificial Sequence
  Description of Artificial Sequence:  Target Sequence/siNA sense region
gcaguccuagccagagguc

SEQ ID NO: 574 - RNA, 19 nt, Artificial Sequence
  Description of Artificial Sequence:  Target Sequence/siNA sense region
ccaucucgcugagauacga

SEQ ID NO: 575 - RNA, 19 nt, Artificial Sequence
  Description of Artificial Sequence:  Target Sequence/siNA sense region
aagggaggguguaccauua

SEQ ID NO: 576 - RNA, 19 nt, Artificial Sequence
  Description of Artificial Sequence:  Target Sequence/siNA sense region
acaggaucaacacugcuuc

SEQ ID NO: 577 - RNA, 19 nt, Artificial Sequence
  Description of Artificial Sequence:  Target Sequence/siNA sense region
cugauggcaagcucuacgu

SEQ ID NO: 578 - RNA, 19 nt, Artificial Sequence
  Description of Artificial Sequence:  Target Sequence/siNA sense region
ucuccuccgagagccgcuu

SEQ ID NO: 579 - RNA, 19 nt, Artificial Sequence
  Description of Artificial Sequence:  Target Sequence/siNA sense region
ucaacacccuggccgaguu

SEQ ID NO: 580 - RNA, 19 nt, Artificial Sequence
  Description of Artificial Sequence:  Target Sequence/siNA sense region
ugguucaucaucauucaac

SEQ ID NO: 581 - RNA, 19 nt, Artificial Sequence
  Description of Artificial Sequence:  Target Sequence/siNA sense region
cgguggccgacgggcucau

SEQ ID NO: 582 - RNA, 19 nt, Artificial Sequence
  Description of Artificial Sequence:  Target Sequence/siNA sense region
ucaccacgcuccauuaucc

SEQ ID NO: 583 - RNA, 19 nt, Artificial Sequence
  Description of Artificial Sequence:  Target Sequence/siNA sense region
cagccccaaagcgcaacaa

SEQ ID NO: 584 - RNA, 19 nt, Artificial Sequence
  Description of Artificial Sequence:  Target Sequence/siNA sense region
agcccacugucuauggugu

SEQ ID NO: 585 - RNA, 19 nt, Artificial Sequence
  Description of Artificial Sequence:  Target Sequence/siNA sense region
ugucccccaacuacgacaa

SEQ ID NO: 586 - RNA, 19 nt, Artificial Sequence
  Description of Artificial Sequence:  Target Sequence/siNA sense region
agugggagauggaacgcac

SEQ ID NO: 587 - RNA, 19 nt, Artificial Sequence
  Description of Artificial Sequence:  Target Sequence/siNA sense region
cggacaucaccaugaagca

SEQ ID NO: 588 - RNA, 19 nt, Artificial Sequence
  Description of Artificial Sequence:  Target Sequence/siNA sense region
acaagcugggcgggggcca

SEQ ID NO: 589 - RNA, 19 nt, Artificial Sequence
  Description of Artificial Sequence:  Target Sequence/siNA sense region
aguacggggagguguacga

SEQ ID NO: 590 - RNA, 19 nt, Artificial Sequence
  Description of Artificial Sequence:  Target Sequence/siNA sense region
agggcguguggaagaaaua

SEQ ID NO: 591 - RNA, 19 nt, Artificial Sequence
  Description of Artificial Sequence:  Target Sequence/siNA sense region
acagccugacgguggccgu

SEQ ID NO: 592 - RNA, 19 nt, Artificial Sequence
  Description of Artificial Sequence:  Target Sequence/siNA sense region
ugaagaccuugaaggagga

SEQ ID NO: 593 - RNA, 19 nt, Artificial Sequence
  Description of Artificial Sequence:  Target Sequence/siNA sense region
acaccauggagguggaaga

SEQ ID NO: 594 - RNA, 19 nt, Artificial Sequence
  Description of Artificial Sequence:  Target Sequence/siNA sense region
aguucuugaaagaagcugc

SEQ ID NO: 595 - RNA, 19 nt, Artificial Sequence
  Description of Artificial Sequence:  Target Sequence/siNA sense region
cagucaugaaagagaucaa

SEQ ID NO: 596 - RNA, 19 nt, Artificial Sequence
  Description of Artificial Sequence:  Target Sequence/siNA sense region
aacacccuaaccuagugca

SEQ ID NO: 597 - RNA, 19 nt, Artificial Sequence
  Description of Artificial Sequence:  Target Sequence/siNA sense region
agcuccuuggggucugcac

SEQ ID NO: 598 - RNA, 19 nt, Artificial Sequence
  Description of Artificial Sequence:  Target Sequence/siNA sense region
cccgggagcccccguucua

SEQ ID NO: 599 - RNA, 19 nt, Artificial Sequence
  Description of Artificial Sequence:  Target Sequence/siNA sense region
auaucaucacugaguucau

SEQ ID NO: 600 - RNA, 19 nt, Artificial Sequence
  Description of Artificial Sequence:  Target Sequence/siNA sense region
ugaccuacgggaaccuccu

SEQ ID NO: 601 - RNA, 19 nt, Artificial Sequence
  Description of Artificial Sequence:  Target Sequence/siNA sense region
uggacuaccugagggagug

SEQ ID NO: 602 - RNA, 19 nt, Artificial Sequence
  Description of Artificial Sequence:  Target Sequence/siNA sense region
gcaaccggcaggaggugaa

SEQ ID NO: 603 - RNA, 19 nt, Artificial Sequence
  Description of Artificial Sequence:  Target Sequence/siNA sense region
acgccguggugcugcugua

SEQ ID NO: 604 - RNA, 19 nt, Artificial Sequence
  Description of Artificial Sequence:  Target Sequence/siNA sense region
acauggccacucagaucuc

SEQ ID NO: 605 - RNA, 19 nt, Artificial Sequence
  Description of Artificial Sequence:  Target Sequence/siNA sense region
cgucagccauggaguaccu

SEQ ID NO: 606 - RNA, 19 nt, Artificial Sequence
  Description of Artificial Sequence:  Target Sequence/siNA sense region
uagagaagaaaaacuucau

SEQ ID NO: 607 - RNA, 19 nt, Artificial Sequence
  Description of Artificial Sequence:  Target Sequence/siNA sense region
uccacagagaucuugcugc

SEQ ID NO: 608 - RNA, 19 nt, Artificial Sequence
  Description of Artificial Sequence:  Target Sequence/siNA sense region
cccgaaacugccugguagg

SEQ ID NO: 609 - RNA, 19 nt, Artificial Sequence
  Description of Artificial Sequence:  Target Sequence/siNA sense region
gggagaaccacuuggugaa

SEQ ID NO: 610 - RNA, 19 nt, Artificial Sequence
  Description of Artificial Sequence:  Target Sequence/siNA sense region
agguagcugauuuuggccu

SEQ ID NO: 611 - RNA, 19 nt, Artificial Sequence
  Description of Artificial Sequence:  Target Sequence/siNA sense region
ugagcagguugaugacagg

SEQ ID NO: 612 - RNA, 19 nt, Artificial Sequence
  Description of Artificial Sequence:  Target Sequence/siNA sense region
gggacaccuacacagccca

SEQ ID NO: 613 - RNA, 19 nt, Artificial Sequence
  Description of Artificial Sequence:  Target Sequence/siNA sense region
augcuggagccaaguuccc

SEQ ID NO: 614 - RNA, 19 nt, Artificial Sequence
  Description of Artificial Sequence:  Target Sequence/siNA sense region
ccaucaaauggacugcacc

SEQ ID NO: 615 - RNA, 19 nt, Artificial Sequence
  Description of Artificial Sequence:  Target Sequence/siNA sense region
ccgagagccuggccuacaa

SEQ ID NO: 616 - RNA, 19 nt, Artificial Sequence
  Description of Artificial Sequence:  Target Sequence/siNA sense region
acaaguucuccaucaaguc

SEQ ID NO: 617 - RNA, 19 nt, Artificial Sequence
  Description of Artificial Sequence:  Target Sequence/siNA sense region
ccgacgucugggcauuugg

SEQ ID NO: 618 - RNA, 19 nt, Artificial Sequence
  Description of Artificial Sequence:  Target Sequence/siNA sense region
gaguauugcuuugggaaau

SEQ ID NO: 619 - RNA, 19 nt, Artificial Sequence
  Description of Artificial Sequence:  Target Sequence/siNA sense region
uugcuaccuauggcauguc

SEQ ID NO: 620 - RNA, 19 nt, Artificial Sequence
  Description of Artificial Sequence:  Target Sequence/siNA sense region
ccccuuacccgggaauuga

SEQ ID NO: 621 - RNA, 19 nt, Artificial Sequence
  Description of Artificial Sequence:  Target Sequence/siNA sense region
accguucccagguguauga

SEQ ID NO: 622 - RNA, 19 nt, Artificial Sequence
  Description of Artificial Sequence:  Target Sequence/siNA sense region
agcugcuagagaaggacua

SEQ ID NO: 623 - RNA, 19 nt, Artificial Sequence
  Description of Artificial Sequence:  Target Sequence/siNA sense region
accgcaugaagcgcccaga

SEQ ID NO: 624 - RNA, 19 nt, Artificial Sequence
  Description of Artificial Sequence:  Target Sequence/siNA sense region
aaggcugcccagagaaggu

SEQ ID NO: 625 - RNA, 19 nt, Artificial Sequence
  Description of Artificial Sequence:  Target Sequence/siNA sense region
ucuaugaacucaugcgagc

SEQ ID NO: 626 - RNA, 19 nt, Artificial Sequence
  Description of Artificial Sequence:  Target Sequence/siNA sense region
cauguuggcaguggaaucc

SEQ ID NO: 627 - RNA, 19 nt, Artificial Sequence
  Description of Artificial Sequence:  Target Sequence/siNA sense region
ccucugaccggcccuccuu

SEQ ID NO: 628 - RNA, 19 nt, Artificial Sequence
  Description of Artificial Sequence:  Target Sequence/siNA sense region
uugcugaaauccaccaagc

SEQ ID NO: 629 - RNA, 19 nt, Artificial Sequence
  Description of Artificial Sequence:  Target Sequence/siNA sense region
ccuuugaaacaauguucca

SEQ ID NO: 630 - RNA, 19 nt, Artificial Sequence
  Description of Artificial Sequence:  Target Sequence/siNA sense region
aggaauccaguaucucaga

SEQ ID NO: 631 - RNA, 19 nt, Artificial Sequence
  Description of Artificial Sequence:  Target Sequence/siNA sense region
acgaaguggaaaaggagcu

SEQ ID NO: 632 - RNA, 19 nt, Artificial Sequence
  Description of Artificial Sequence:  Target Sequence/siNA sense region
uggggaaacaaggcguccg

SEQ ID NO: 633 - RNA, 19 nt, Artificial Sequence
  Description of Artificial Sequence:  Target Sequence/siNA sense region
guggggcugugacuaccuu

SEQ ID NO: 634 - RNA, 19 nt, Artificial Sequence
  Description of Artificial Sequence:  Target Sequence/siNA sense region
ugcugcaggccccagagcu

SEQ ID NO: 635 - RNA, 19 nt, Artificial Sequence
  Description of Artificial Sequence:  Target Sequence/siNA sense region
ugcccaccaagacgaggac

SEQ ID NO: 636 - RNA, 19 nt, Artificial Sequence
  Description of Artificial Sequence:  Target Sequence/siNA sense region
ccuccaggagagcugcaga

SEQ ID NO: 637 - RNA, 19 nt, Artificial Sequence
  Description of Artificial Sequence:  Target Sequence/siNA sense region
agcacagagacaccacuga

SEQ ID NO: 638 - RNA, 19 nt, Artificial Sequence
  Description of Artificial Sequence:  Target Sequence/siNA sense region
acgugccugagaugccuca

SEQ ID NO: 639 - RNA, 19 nt, Artificial Sequence
  Description of Artificial Sequence:  Target Sequence/siNA sense region
acuccaagggccagggaga

SEQ ID NO: 640 - RNA, 19 nt, Artificial Sequence
  Description of Artificial Sequence:  Target Sequence/siNA sense region
agagcgauccucuggacca

SEQ ID NO: 641 - RNA, 19 nt, Artificial Sequence
  Description of Artificial Sequence:  Target Sequence/siNA sense region
augagccugccgugucucc

SEQ ID NO: 642 - RNA, 19 nt, Artificial Sequence
  Description of Artificial Sequence:  Target Sequence/siNA sense region
cauugcucccucgaaaaga

SEQ ID NO: 643 - RNA, 19 nt, Artificial Sequence
  Description of Artificial Sequence:  Target Sequence/siNA sense region
agcgaggucccccggaggg

SEQ ID NO: 644 - RNA, 19 nt, Artificial Sequence
  Description of Artificial Sequence:  Target Sequence/siNA sense region
gcggccugaaugaagauga

SEQ ID NO: 645 - RNA, 19 nt, Artificial Sequence
  Description of Artificial Sequence:  Target Sequence/siNA sense region
agcgccuucuccccaaaga

SEQ ID NO: 646 - RNA, 19 nt, Artificial Sequence
  Description of Artificial Sequence:  Target Sequence/siNA sense region
acaaaaagaccaacuuguu

SEQ ID NO: 647 - RNA, 19 nt, Artificial Sequence
  Description of Artificial Sequence:  Target Sequence/siNA sense region
ucagcgccuugaucaagaa

SEQ ID NO: 648 - RNA, 19 nt, Artificial Sequence
  Description of Artificial Sequence:  Target Sequence/siNA sense region
agaagaagaagacagcccc

SEQ ID NO: 649 - RNA, 19 nt, Artificial Sequence
  Description of Artificial Sequence:  Target Sequence/siNA sense region
caaccccucccaaacgcag

SEQ ID NO: 650 - RNA, 19 nt, Artificial Sequence
  Description of Artificial Sequence:  Target Sequence/siNA sense region
gcagcuccuuccgggagau

SEQ ID NO: 651 - RNA, 19 nt, Artificial Sequence
  Description of Artificial Sequence:  Target Sequence/siNA sense region
uggacggccagccggagcg

SEQ ID NO: 652 - RNA, 19 nt, Artificial Sequence
  Description of Artificial Sequence:  Target Sequence/siNA sense region
gcagaggggccggcgagga

SEQ ID NO: 653 - RNA, 19 nt, Artificial Sequence
  Description of Artificial Sequence:  Target Sequence/siNA sense region
aagagggccgagacaucag

SEQ ID NO: 654 - RNA, 19 nt, Artificial Sequence
  Description of Artificial Sequence:  Target Sequence/siNA sense region
gcaacggggcacuggcuuu

SEQ ID NO: 655 - RNA, 19 nt, Artificial Sequence
  Description of Artificial Sequence:  Target Sequence/siNA sense region
ucacccccuuggacacagc

SEQ ID NO: 656 - RNA, 19 nt, Artificial Sequence
  Description of Artificial Sequence:  Target Sequence/siNA sense region
cugacccagccaagucccc

SEQ ID NO: 657 - RNA, 19 nt, Artificial Sequence
  Description of Artificial Sequence:  Target Sequence/siNA sense region
caaagcccagcaauggggc

SEQ ID NO: 658 - RNA, 19 nt, Artificial Sequence
  Description of Artificial Sequence:  Target Sequence/siNA sense region
cugggguccccaauggagc

SEQ ID NO: 659 - RNA, 19 nt, Artificial Sequence
  Description of Artificial Sequence:  Target Sequence/siNA sense region
cccuccgggaguccggggg

SEQ ID NO: 660 - RNA, 19 nt, Artificial Sequence
  Description of Artificial Sequence:  Target Sequence/siNA sense region
gcucaggcuuccggucucc

SEQ ID NO: 661 - RNA, 19 nt, Artificial Sequence
  Description of Artificial Sequence:  Target Sequence/siNA sense region
cccaccuguggaagaaguc

SEQ ID NO: 662 - RNA, 19 nt, Artificial Sequence
  Description of Artificial Sequence:  Target Sequence/siNA sense region
ccagcacgcugaccagcag

SEQ ID NO: 663 - RNA, 19 nt, Artificial Sequence
  Description of Artificial Sequence:  Target Sequence/siNA sense region
gccgccuagccaccggcga

SEQ ID NO: 664 - RNA, 19 nt, Artificial Sequence
  Description of Artificial Sequence:  Target Sequence/siNA sense region
aggaggagggcgguggcag

SEQ ID NO: 665 - RNA, 19 nt, Artificial Sequence
  Description of Artificial Sequence:  Target Sequence/siNA sense region
gcuccagcaagcgcuuccu

SEQ ID NO: 666 - RNA, 19 nt, Artificial Sequence
  Description of Artificial Sequence:  Target Sequence/siNA sense region
ugcgcucuugcuccgucuc

SEQ ID NO: 667 - RNA, 19 nt, Artificial Sequence
  Description of Artificial Sequence:  Target Sequence/siNA sense region
ccugcguuccccauggggc

SEQ ID NO: 668 - RNA, 19 nt, Artificial Sequence
  Description of Artificial Sequence:  Target Sequence/siNA sense region
ccaaggacacggaguggag

SEQ ID NO: 669 - RNA, 19 nt, Artificial Sequence
  Description of Artificial Sequence:  Target Sequence/siNA sense region
ggucagucacgcugccucg

SEQ ID NO: 670 - RNA, 19 nt, Artificial Sequence
  Description of Artificial Sequence:  Target Sequence/siNA sense region
gggacuugcaguccacggg

SEQ ID NO: 671 - RNA, 19 nt, Artificial Sequence
  Description of Artificial Sequence:  Target Sequence/siNA sense region
gaagacaguuugacucguc

SEQ ID NO: 672 - RNA, 19 nt, Artificial Sequence
  Description of Artificial Sequence:  Target Sequence/siNA sense region
ccacauuuggagggcacaa

SEQ ID NO: 673 - RNA, 19 nt, Artificial Sequence
  Description of Artificial Sequence:  Target Sequence/siNA sense region
aaagugagaagccggcucu

SEQ ID NO: 674 - RNA, 19 nt, Artificial Sequence
  Description of Artificial Sequence:  Target Sequence/siNA sense region
ugccucggaagagggcagg

SEQ ID NO: 675 - RNA, 19 nt, Artificial Sequence
  Description of Artificial Sequence:  Target Sequence/siNA sense region
gggagaacaggucugacca

SEQ ID NO: 676 - RNA, 19 nt, Artificial Sequence
  Description of Artificial Sequence:  Target Sequence/siNA sense region
aggugacccgaggcacagu

SEQ ID NO: 677 - RNA, 19 nt, Artificial Sequence
  Description of Artificial Sequence:  Target Sequence/siNA sense region
uaacgccuccccccaggcu

SEQ ID NO: 678 - RNA, 19 nt, Artificial Sequence
  Description of Artificial Sequence:  Target Sequence/siNA sense region
uggugaaaaagaaugagga

SEQ ID NO: 679 - RNA, 19 nt, Artificial Sequence
  Description of Artificial Sequence:  Target Sequence/siNA sense region
aagcugcugaugaggucuu

SEQ ID NO: 680 - RNA, 19 nt, Artificial Sequence
  Description of Artificial Sequence:  Target Sequence/siNA sense region
ucaaagacaucauggaguc

SEQ ID NO: 681 - RNA, 19 nt, Artificial Sequence
  Description of Artificial Sequence:  Target Sequence/siNA sense region
ccagcccgggcuccagccc

SEQ ID NO: 682 - RNA, 19 nt, Artificial Sequence
  Description of Artificial Sequence:  Target Sequence/siNA sense region
cgcccaaccugacuccaaa

SEQ ID NO: 683 - RNA, 19 nt, Artificial Sequence
  Description of Artificial Sequence:  Target Sequence/siNA sense region
aaccccuccggcggcaggu

SEQ ID NO: 684 - RNA, 19 nt, Artificial Sequence
  Description of Artificial Sequence:  Target Sequence/siNA sense region
ucaccguggccccugccuc

SEQ ID NO: 685 - RNA, 19 nt, Artificial Sequence
  Description of Artificial Sequence:  Target Sequence/siNA sense region
cgggccucccccacaagga

SEQ ID NO: 686 - RNA, 19 nt, Artificial Sequence
  Description of Artificial Sequence:  Target Sequence/siNA sense region
aagaagccuggaaaggcag

SEQ ID NO: 687 - RNA, 19 nt, Artificial Sequence
  Description of Artificial Sequence:  Target Sequence/siNA sense region
gugccuuagggaccccugc

SEQ ID NO: 688 - RNA, 19 nt, Artificial Sequence
  Description of Artificial Sequence:  Target Sequence/siNA sense region
cugcagcugagccagugac

SEQ ID NO: 689 - RNA, 19 nt, Artificial Sequence
  Description of Artificial Sequence:  Target Sequence/siNA sense region
cccccaccagcaaagcagg

SEQ ID NO: 690 - RNA, 19 nt, Artificial Sequence
  Description of Artificial Sequence:  Target Sequence/siNA sense region
gcucaggugcaccaagggg

SEQ ID NO: 691 - RNA, 19 nt, Artificial Sequence
  Description of Artificial Sequence:  Target Sequence/siNA sense region
gcaccagcaagggccccgc

SEQ ID NO: 692 - RNA, 19 nt, Artificial Sequence
  Description of Artificial Sequence:  Target Sequence/siNA sense region
ccgaggaguccagagugag

SEQ ID NO: 693 - RNA, 19 nt, Artificial Sequence
  Description of Artificial Sequence:  Target Sequence/siNA sense region
ggaggcacaagcacuccuc

SEQ ID NO: 694 - RNA, 19 nt, Artificial Sequence
  Description of Artificial Sequence:  Target Sequence/siNA sense region
cugagucgccagggaggga

SEQ ID NO: 695 - RNA, 19 nt, Artificial Sequence
  Description of Artificial Sequence:  Target Sequence/siNA sense region
acaaggggaaauuguccaa

SEQ ID NO: 696 - RNA, 19 nt, Artificial Sequence
  Description of Artificial Sequence:  Target Sequence/siNA sense region
agcucaaaccugccccgcc

SEQ ID NO: 697 - RNA, 19 nt, Artificial Sequence
  Description of Artificial Sequence:  Target Sequence/siNA sense region
cgcccccaccagcagccuc

SEQ ID NO: 698 - RNA, 19 nt, Artificial Sequence
  Description of Artificial Sequence:  Target Sequence/siNA sense region
cugcagggaaggcuggagg

SEQ ID NO: 699 - RNA, 19 nt, Artificial Sequence
  Description of Artificial Sequence:  Target Sequence/siNA sense region
gaaagcccucgcagaggcc

SEQ ID NO: 700 - RNA, 19 nt, Artificial Sequence
  Description of Artificial Sequence:  Target Sequence/siNA sense region
ccggccaggaggcugccgg

SEQ ID NO: 701 - RNA, 19 nt, Artificial Sequence
  Description of Artificial Sequence:  Target Sequence/siNA sense region
gggaggcagucuugggcgc

SEQ ID NO: 702 - RNA, 19 nt, Artificial Sequence
  Description of Artificial Sequence:  Target Sequence/siNA sense region
caaagacaaaagccacgag

SEQ ID NO: 703 - RNA, 19 nt, Artificial Sequence
  Description of Artificial Sequence:  Target Sequence/siNA sense region
gucugguugaugcugugaa

SEQ ID NO: 704 - RNA, 19 nt, Artificial Sequence
  Description of Artificial Sequence:  Target Sequence/siNA sense region
acagugacgcugccaagcc

SEQ ID NO: 705 - RNA, 19 nt, Artificial Sequence
  Description of Artificial Sequence:  Target Sequence/siNA sense region
ccagccagccggcagaggg

SEQ ID NO: 706 - RNA, 19 nt, Artificial Sequence
  Description of Artificial Sequence:  Target Sequence/siNA sense region
gccucaaaaagcccgugcu

SEQ ID NO: 707 - RNA, 19 nt, Artificial Sequence
  Description of Artificial Sequence:  Target Sequence/siNA sense region
ucccggccacuccaaagcc

SEQ ID NO: 708 - RNA, 19 nt, Artificial Sequence
  Description of Artificial Sequence:  Target Sequence/siNA sense region
cacaccccgccaagccguc

SEQ ID NO: 709 - RNA, 19 nt, Artificial Sequence
  Description of Artificial Sequence:  Target Sequence/siNA sense region
cggggacccccaucagccc

SEQ ID NO: 710 - RNA, 19 nt, Artificial Sequence
  Description of Artificial Sequence:  Target Sequence/siNA sense region
cagcccccguuccccuuuc

SEQ ID NO: 711 - RNA, 19 nt, Artificial Sequence
  Description of Artificial Sequence:  Target Sequence/siNA sense region
ccacguugccaucagcauc

SEQ ID NO: 712 - RNA, 19 nt, Artificial Sequence
  Description of Artificial Sequence:  Target Sequence/siNA sense region
ccucggccuuggcagggga

SEQ ID NO: 713 - RNA, 19 nt, Artificial Sequence
  Description of Artificial Sequence:  Target Sequence/siNA sense region
accagccgucuuccacugc

SEQ ID NO: 714 - RNA, 19 nt, Artificial Sequence
  Description of Artificial Sequence:  Target Sequence/siNA sense region
ccuucaucccucucauauc

SEQ ID NO: 715 - RNA, 19 nt, Artificial Sequence
  Description of Artificial Sequence:  Target Sequence/siNA sense region
caacccgagugucucuucg

SEQ ID NO: 716 - RNA, 19 nt, Artificial Sequence
  Description of Artificial Sequence:  Target Sequence/siNA sense region
ggaaaacccgccagccucc

SEQ ID NO: 717 - RNA, 19 nt, Artificial Sequence
  Description of Artificial Sequence:  Target Sequence/siNA sense region
cagagcgggccagcggcgc

SEQ ID NO: 718 - RNA, 19 nt, Artificial Sequence
  Description of Artificial Sequence:  Target Sequence/siNA sense region
ccaucaccaagggcguggu

SEQ ID NO: 719 - RNA, 19 nt, Artificial Sequence
  Description of Artificial Sequence:  Target Sequence/siNA sense region
ucuuggacagcaccgaggc

SEQ ID NO: 720 - RNA, 19 nt, Artificial Sequence
  Description of Artificial Sequence:  Target Sequence/siNA sense region
cgcugugccucgccaucuc

SEQ ID NO: 721 - RNA, 19 nt, Artificial Sequence
  Description of Artificial Sequence:  Target Sequence/siNA sense region
cugggaacuccgagcagau

SEQ ID NO: 722 - RNA, 19 nt, Artificial Sequence
  Description of Artificial Sequence:  Target Sequence/siNA sense region
uggccagccacagcgcagu

SEQ ID NO: 723 - RNA, 19 nt, Artificial Sequence
  Description of Artificial Sequence:  Target Sequence/siNA sense region
ugcuggaggccggcaaaaa

SEQ ID NO: 724 - RNA, 19 nt, Artificial Sequence
  Description of Artificial Sequence:  Target Sequence/siNA sense region
accucuacacguucugcgu

SEQ ID NO: 725 - RNA, 19 nt, Artificial Sequence
  Description of Artificial Sequence:  Target Sequence/siNA sense region
ugagcuauguggauuccau

SEQ ID NO: 726 - RNA, 19 nt, Artificial Sequence
  Description of Artificial Sequence:  Target Sequence/siNA sense region
uccagcaaaugaggaacaa

SEQ ID NO: 727 - RNA, 19 nt, Artificial Sequence
  Description of Artificial Sequence:  Target Sequence/siNA sense region
aguuugccuuccgagaggc

SEQ ID NO: 728 - RNA, 19 nt, Artificial Sequence
  Description of Artificial Sequence:  Target Sequence/siNA sense region
ccaucaacaaacuggagaa

SEQ ID NO: 729 - RNA, 19 nt, Artificial Sequence
  Description of Artificial Sequence:  Target Sequence/siNA sense region
auaaucuccgggagcuuca

SEQ ID NO: 730 - RNA, 19 nt, Artificial Sequence
  Description of Artificial Sequence:  Target Sequence/siNA sense region
agaucugcccggcgucagc

SEQ ID NO: 731 - RNA, 19 nt, Artificial Sequence
  Description of Artificial Sequence:  Target Sequence/siNA sense region
caggcagugguccggcggc

SEQ ID NO: 732 - RNA, 19 nt, Artificial Sequence
  Description of Artificial Sequence:  Target Sequence/siNA sense region
ccacucaggacuucagcaa

SEQ ID NO: 733 - RNA, 19 nt, Artificial Sequence
  Description of Artificial Sequence:  Target Sequence/siNA sense region
agcuccucaguucggugaa

SEQ ID NO: 734 - RNA, 19 nt, Artificial Sequence
  Description of Artificial Sequence:  Target Sequence/siNA sense region
aggaaaucagugacauagu

SEQ ID NO: 735 - RNA, 19 nt, Artificial Sequence
  Description of Artificial Sequence:  Target Sequence/siNA sense region
ugcagagguagcagcaguc

SEQ ID NO: 736 - RNA, 19 nt, Artificial Sequence
  Description of Artificial Sequence:  Target Sequence/siNA sense region
caggggucaggugucaggc

SEQ ID NO: 737 - RNA, 19 nt, Artificial Sequence
  Description of Artificial Sequence:  Target Sequence/siNA sense region
cccgucggagcugccugca

SEQ ID NO: 738 - RNA, 19 nt, Artificial Sequence
  Description of Artificial Sequence:  Target Sequence/siNA sense region
agcacaugcgggcucgccc

SEQ ID NO: 739 - RNA, 19 nt, Artificial Sequence
  Description of Artificial Sequence:  Target Sequence/siNA sense region
cauacccaugacaguggcu

SEQ ID NO: 740 - RNA, 19 nt, Artificial Sequence
  Description of Artificial Sequence:  Target Sequence/siNA sense region
ugagaagggacuagugagu

SEQ ID NO: 741 - RNA, 19 nt, Artificial Sequence
  Description of Artificial Sequence:  Target Sequence/siNA sense region
ucagcaccuuggcccagga

SEQ ID NO: 742 - RNA, 19 nt, Artificial Sequence
  Description of Artificial Sequence:  Target Sequence/siNA sense region
agcucugcgccaggcagag

SEQ ID NO: 743 - RNA, 19 nt, Artificial Sequence
  Description of Artificial Sequence:  Target Sequence/siNA sense region
gcugagggcccuguggagu

SEQ ID NO: 744 - RNA, 19 nt, Artificial Sequence
  Description of Artificial Sequence:  Target Sequence/siNA sense region
uccagcucuacuaccuacg

SEQ ID NO: 745 - RNA, 19 nt, Artificial Sequence
  Description of Artificial Sequence:  Target Sequence/siNA sense region
guuugcaccgccugcccuc

SEQ ID NO: 746 - RNA, 19 nt, Artificial Sequence
  Description of Artificial Sequence:  Target Sequence/siNA sense region
cccgcaccuuccuccuccc

SEQ ID NO: 747 - RNA, 19 nt, Artificial Sequence
  Description of Artificial Sequence:  Target Sequence/siNA sense region
ccgcuccgucucuguccuc

SEQ ID NO: 748 - RNA, 19 nt, Artificial Sequence
  Description of Artificial Sequence:  Target Sequence/siNA sense region
cgaauuuuaucuguggagu

SEQ ID NO: 749 - RNA, 19 nt, Artificial Sequence
  Description of Artificial Sequence:  Target Sequence/siNA sense region
uuccugcuccguggacugc

SEQ ID NO: 750 - RNA, 19 nt, Artificial Sequence
  Description of Artificial Sequence:  Target Sequence/siNA sense region
cagucggcaugccaggacc

SEQ ID NO: 751 - RNA, 19 nt, Artificial Sequence
  Description of Artificial Sequence:  Target Sequence/siNA sense region
ccgccagccccgcucccac

SEQ ID NO: 752 - RNA, 19 nt, Artificial Sequence
  Description of Artificial Sequence:  Target Sequence/siNA sense region
ccuagugccccagacugag

SEQ ID NO: 753 - RNA, 19 nt, Artificial Sequence
  Description of Artificial Sequence:  Target Sequence/siNA sense region
gcucuccaggccagguggg

SEQ ID NO: 754 - RNA, 19 nt, Artificial Sequence
  Description of Artificial Sequence:  Target Sequence/siNA sense region
gaacggcugauguggacug

SEQ ID NO: 755 - RNA, 19 nt, Artificial Sequence
  Description of Artificial Sequence:  Target Sequence/siNA sense region
gucuuuuucauuuuuuucu

SEQ ID NO: 756 - RNA, 19 nt, Artificial Sequence
  Description of Artificial Sequence:  Target Sequence/siNA sense region
ucucuggagccccuccucc

SEQ ID NO: 757 - RNA, 19 nt, Artificial Sequence
  Description of Artificial Sequence:  Target Sequence/siNA sense region
ccccggcugggccuccuuc

SEQ ID NO: 758 - RNA, 19 nt, Artificial Sequence
  Description of Artificial Sequence:  Target Sequence/siNA sense region
cuuccacuucuccaagaau

SEQ ID NO: 759 - RNA, 19 nt, Artificial Sequence
  Description of Artificial Sequence:  Target Sequence/siNA sense region
uggaagccugaacugaggc

SEQ ID NO: 760 - RNA, 19 nt, Artificial Sequence
  Description of Artificial Sequence:  Target Sequence/siNA sense region
ccuugugugucaggcccuc

SEQ ID NO: 761 - RNA, 19 nt, Artificial Sequence
  Description of Artificial Sequence:  Target Sequence/siNA sense region
cugccugcacucccuggcc

SEQ ID NO: 762 - RNA, 19 nt, Artificial Sequence
  Description of Artificial Sequence:  Target Sequence/siNA sense region
cuugcccgucgugugcuga

SEQ ID NO: 763 - RNA, 19 nt, Artificial Sequence
  Description of Artificial Sequence:  Target Sequence/siNA sense region
aagacauguuucaagaacc

SEQ ID NO: 764 - RNA, 19 nt, Artificial Sequence
  Description of Artificial Sequence:  Target Sequence/siNA sense region
cgccauuucgggaagggca

SEQ ID NO: 765 - RNA, 19 nt, Artificial Sequence
  Description of Artificial Sequence:  Target Sequence/siNA sense region
augcacgggccaugcacac

SEQ ID NO: 766 - RNA, 19 nt, Artificial Sequence
  Description of Artificial Sequence:  Target Sequence/siNA sense region
cggcuggucacucugcccu

SEQ ID NO: 767 - RNA, 19 nt, Artificial Sequence
  Description of Artificial Sequence:  Target Sequence/siNA sense region
ucugcugcugcccggggug

SEQ ID NO: 768 - RNA, 19 nt, Artificial Sequence
  Description of Artificial Sequence:  Target Sequence/siNA sense region
ggggugcacucgccauuuc

SEQ ID NO: 769 - RNA, 19 nt, Artificial Sequence
  Description of Artificial Sequence:  Target Sequence/siNA sense region
ccucacgugcaggacagcu

SEQ ID NO: 770 - RNA, 19 nt, Artificial Sequence
  Description of Artificial Sequence:  Target Sequence/siNA sense region
ucuugauuuggguggaaaa

SEQ ID NO: 771 - RNA, 19 nt, Artificial Sequence
  Description of Artificial Sequence:  Target Sequence/siNA sense region
acagggugcuaaagccaac

SEQ ID NO: 772 - RNA, 19 nt, Artificial Sequence
  Description of Artificial Sequence:  Target Sequence/siNA sense region
ccagccuuuggguccuggg

SEQ ID NO: 773 - RNA, 19 nt, Artificial Sequence
  Description of Artificial Sequence:  Target Sequence/siNA sense region
gcaggugggagcugaaaag

SEQ ID NO: 774 - RNA, 19 nt, Artificial Sequence
  Description of Artificial Sequence:  Target Sequence/siNA sense region
ggaucgaggcauggggcau

SEQ ID NO: 775 - RNA, 19 nt, Artificial Sequence
  Description of Artificial Sequence:  Target Sequence/siNA sense region
uguccuuuccaucugucca

SEQ ID NO: 776 - RNA, 19 nt, Artificial Sequence
  Description of Artificial Sequence:  Target Sequence/siNA sense region
acauccccagagcccagcu

SEQ ID NO: 777 - RNA, 19 nt, Artificial Sequence
  Description of Artificial Sequence:  Target Sequence/siNA sense region
ucuugcucucuugugacgu

SEQ ID NO: 778 - RNA, 19 nt, Artificial Sequence
  Description of Artificial Sequence:  Target Sequence/siNA sense region
ugcacugugaauccuggca

SEQ ID NO: 779 - RNA, 19 nt, Artificial Sequence
  Description of Artificial Sequence:  Target Sequence/siNA sense region
aagaaagcuugagucucaa

SEQ ID NO: 780 - RNA, 19 nt, Artificial Sequence
  Description of Artificial Sequence:  Target Sequence/siNA sense region
aggguggcaggucacuguc

SEQ ID NO: 781 - RNA, 19 nt, Artificial Sequence
  Description of Artificial Sequence:  Target Sequence/siNA sense region
cacugccgacaucccuccc

SEQ ID NO: 782 - RNA, 19 nt, Artificial Sequence
  Description of Artificial Sequence:  Target Sequence/siNA sense region
cccagcagaauggaggcag

SEQ ID NO: 783 - RNA, 19 nt, Artificial Sequence
  Description of Artificial Sequence:  Target Sequence/siNA sense region
ggggacaagggaggcagug

SEQ ID NO: 784 - RNA, 19 nt, Artificial Sequence
  Description of Artificial Sequence:  Target Sequence/siNA sense region
ggcuaguggggugaacagc

SEQ ID NO: 785 - RNA, 19 nt, Artificial Sequence
  Description of Artificial Sequence:  Target Sequence/siNA sense region
cuggugccaaauagcccca

SEQ ID NO: 786 - RNA, 19 nt, Artificial Sequence
  Description of Artificial Sequence:  Target Sequence/siNA sense region
agacugggcccaggcaggu

SEQ ID NO: 787 - RNA, 19 nt, Artificial Sequence
  Description of Artificial Sequence:  Target Sequence/siNA sense region
ucugcaagggcccagagug

SEQ ID NO: 788 - RNA, 19 nt, Artificial Sequence
  Description of Artificial Sequence:  Target Sequence/siNA sense region
gaaccguccuuucacacau

SEQ ID NO: 789 - RNA, 19 nt, Artificial Sequence
  Description of Artificial Sequence:  Target Sequence/siNA sense region
ucugggugcccugaagggc

SEQ ID NO: 790 - RNA, 19 nt, Artificial Sequence
  Description of Artificial Sequence:  Target Sequence/siNA sense region
cccuuccccucccccacuc

SEQ ID NO: 791 - RNA, 19 nt, Artificial Sequence
  Description of Artificial Sequence:  Target Sequence/siNA sense region
ccucuaagacaaaguagau

SEQ ID NO: 792 - RNA, 19 nt, Artificial Sequence
  Description of Artificial Sequence:  Target Sequence/siNA sense region
uucuuacaaggcccuuucc

SEQ ID NO: 793 - RNA, 19 nt, Artificial Sequence
  Description of Artificial Sequence:  Target Sequence/siNA sense region
cuuuggaacaagacagccu

SEQ ID NO: 794 - RNA, 19 nt, Artificial Sequence
  Description of Artificial Sequence:  Target Sequence/siNA sense region
uucacuuuucugaguucuu

SEQ ID NO: 795 - RNA, 19 nt, Artificial Sequence
  Description of Artificial Sequence:  Target Sequence/siNA sense region
ugaagcauuucaaagcccu

SEQ ID NO: 796 - RNA, 19 nt, Artificial Sequence
  Description of Artificial Sequence:  Target Sequence/siNA sense region
ugccucuguguagccgccc

SEQ ID NO: 797 - RNA, 19 nt, Artificial Sequence
  Description of Artificial Sequence:  Target Sequence/siNA sense region
cugagagagaauagagcug

SEQ ID NO: 798 - RNA, 19 nt, Artificial Sequence
  Description of Artificial Sequence:  Target Sequence/siNA sense region
gccacugggcaccucgcga

SEQ ID NO: 799 - RNA, 19 nt, Artificial Sequence
  Description of Artificial Sequence:  Target Sequence/siNA sense region
acaggugggaggaaagggc

SEQ ID NO: 800 - RNA, 19 nt, Artificial Sequence
  Description of Artificial Sequence:  Target Sequence/siNA sense region
ccugcgcaguccugguccu

SEQ ID NO: 801 - RNA, 19 nt, Artificial Sequence
  Description of Artificial Sequence:  Target Sequence/siNA sense region
uggcugcacucuugaacug

SEQ ID NO: 802 - RNA, 19 nt, Artificial Sequence
  Description of Artificial Sequence:  Target Sequence/siNA sense region
gggcgaaugucuuauuuaa

SEQ ID NO: 803 - RNA, 19 nt, Artificial Sequence
  Description of Artificial Sequence:  Target Sequence/siNA sense region
auuaccgugagugacauag

SEQ ID NO: 804 - RNA, 19 nt, Artificial Sequence
  Description of Artificial Sequence:  Target Sequence/siNA sense region
gccucauguucuguggggg

SEQ ID NO: 805 - RNA, 19 nt, Artificial Sequence
  Description of Artificial Sequence:  Target Sequence/siNA sense region
gucaucagggaggguuagg

SEQ ID NO: 806 - RNA, 19 nt, Artificial Sequence
  Description of Artificial Sequence:  Target Sequence/siNA sense region
gaaaaccacaaacggagcc

SEQ ID NO: 807 - RNA, 19 nt, Artificial Sequence
  Description of Artificial Sequence:  Target Sequence/siNA sense region
cccugaaagccucacguau

SEQ ID NO: 808 - RNA, 19 nt, Artificial Sequence
  Description of Artificial Sequence:  Target Sequence/siNA sense region
uuucacagagcacgccugc

SEQ ID NO: 809 - RNA, 19 nt, Artificial Sequence
  Description of Artificial Sequence:  Target Sequence/siNA sense region
ccaucuucuccccgaggcu

SEQ ID NO: 810 - RNA, 19 nt, Artificial Sequence
  Description of Artificial Sequence:  Target Sequence/siNA sense region
ugccccaggccggagccca

SEQ ID NO: 811 - RNA, 19 nt, Artificial Sequence
  Description of Artificial Sequence:  Target Sequence/siNA sense region
agauaccggcgggcuguga

SEQ ID NO: 812 - RNA, 19 nt, Artificial Sequence
  Description of Artificial Sequence:  Target Sequence/siNA sense region
acucugggcagggacccgg

SEQ ID NO: 813 - RNA, 19 nt, Artificial Sequence
  Description of Artificial Sequence:  Target Sequence/siNA sense region
gggucuccuggaccuugac

SEQ ID NO: 814 - RNA, 19 nt, Artificial Sequence
  Description of Artificial Sequence:  Target Sequence/siNA sense region
cagagcagcuaacuccgag

SEQ ID NO: 815 - RNA, 19 nt, Artificial Sequence
  Description of Artificial Sequence:  Target Sequence/siNA sense region
gagcagugggcagguggcc

SEQ ID NO: 816 - RNA, 19 nt, Artificial Sequence
  Description of Artificial Sequence:  Target Sequence/siNA sense region
cgccccugaggcuucacgc

SEQ ID NO: 817 - RNA, 19 nt, Artificial Sequence
  Description of Artificial Sequence:  Target Sequence/siNA sense region
ccggagaagccaccuuccc

SEQ ID NO: 818 - RNA, 19 nt, Artificial Sequence
  Description of Artificial Sequence:  Target Sequence/siNA sense region
cgccccuucauaccgccuc

SEQ ID NO: 819 - RNA, 19 nt, Artificial Sequence
  Description of Artificial Sequence:  Target Sequence/siNA sense region
cgugccagcagccucgcac

SEQ ID NO: 820 - RNA, 19 nt, Artificial Sequence
  Description of Artificial Sequence:  Target Sequence/siNA sense region
caggcccuagcuuuacgcu

SEQ ID NO: 821 - RNA, 19 nt, Artificial Sequence
  Description of Artificial Sequence:  Target Sequence/siNA sense region
ucaucaccuaaacuuguac

SEQ ID NO: 822 - RNA, 19 nt, Artificial Sequence
  Description of Artificial Sequence:  Target Sequence/siNA sense region
cuuuauuuuucugauagaa

SEQ ID NO: 823 - RNA, 19 nt, Artificial Sequence
  Description of Artificial Sequence:  Target Sequence/siNA sense region
aaugguuuccucuggaucg

SEQ ID NO: 824 - RNA, 19 nt, Artificial Sequence
  Description of Artificial Sequence:  Target Sequence/siNA sense region
guuuuaugcgguucuuaca

SEQ ID NO: 825 - RNA, 19 nt, Artificial Sequence
  Description of Artificial Sequence:  Target Sequence/siNA sense region
agcacaucaccucuuuccc

SEQ ID NO: 826 - RNA, 19 nt, Artificial Sequence
  Description of Artificial Sequence:  Target Sequence/siNA sense region
ccccgacggcugugacgca

SEQ ID NO: 827 - RNA, 19 nt, Artificial Sequence
  Description of Artificial Sequence:  Target Sequence/siNA sense region
agcggagaggcacuaguca

SEQ ID NO: 828 - RNA, 19 nt, Artificial Sequence
  Description of Artificial Sequence:  Target Sequence/siNA sense region
accgacagcggccuugaag

SEQ ID NO: 829 - RNA, 19 nt, Artificial Sequence
  Description of Artificial Sequence:  Target Sequence/siNA sense region
gacagagcaaagcccccac

SEQ ID NO: 830 - RNA, 19 nt, Artificial Sequence
  Description of Artificial Sequence:  Target Sequence/siNA sense region
cccaggucccccgacugcc

SEQ ID NO: 831 - RNA, 19 nt, Artificial Sequence
  Description of Artificial Sequence:  Target Sequence/siNA sense region
cugucuccaugagguacug

SEQ ID NO: 832 - RNA, 19 nt, Artificial Sequence
  Description of Artificial Sequence:  Target Sequence/siNA sense region
ggucccuuccuuuuguuaa

SEQ ID NO: 833 - RNA, 19 nt, Artificial Sequence
  Description of Artificial Sequence:  Target Sequence/siNA sense region
acgugaugugccacuauau

SEQ ID NO: 834 - RNA, 19 nt, Artificial Sequence
  Description of Artificial Sequence:  Target Sequence/siNA sense region
uuuuacacguaucucuugg

SEQ ID NO: 835 - RNA, 19 nt, Artificial Sequence
  Description of Artificial Sequence:  Target Sequence/siNA sense region
guaugcaucuuuuauagac

SEQ ID NO: 836 - RNA, 19 nt, Artificial Sequence
  Description of Artificial Sequence:  Target Sequence/siNA sense region
cgcucuuuucuaaguggcg

SEQ ID NO: 837 - RNA, 19 nt, Artificial Sequence
  Description of Artificial Sequence:  Target Sequence/siNA sense region
gugugcauagcguccugcc

SEQ ID NO: 838 - RNA, 19 nt, Artificial Sequence
  Description of Artificial Sequence:  Target Sequence/siNA sense region
ccugcccucgggggccugu

SEQ ID NO: 839 - RNA, 19 nt, Artificial Sequence
  Description of Artificial Sequence:  Target Sequence/siNA sense region
ugguggcucccccucugcu

SEQ ID NO: 840 - RNA, 19 nt, Artificial Sequence
  Description of Artificial Sequence:  Target Sequence/siNA sense region
uucucgggguccagugcau

SEQ ID NO: 841 - RNA, 19 nt, Artificial Sequence
  Description of Artificial Sequence:  Target Sequence/siNA sense region
uuuuguuucuguauaugau

SEQ ID NO: 842 - RNA, 19 nt, Artificial Sequence
  Description of Artificial Sequence:  Target Sequence/siNA sense region
uucucugugguuuuuuuug

SEQ ID NO: 843 - RNA, 19 nt, Artificial Sequence
  Description of Artificial Sequence:  Target Sequence/siNA sense region
gaauccaaaucuguccucu

SEQ ID NO: 844 - RNA, 19 nt, Artificial Sequence
  Description of Artificial Sequence:  Target Sequence/siNA sense region
uguaguauuuuuuaaauaa

SEQ ID NO: 845 - RNA, 19 nt, Artificial Sequence
  Description of Artificial Sequence:  Target Sequence/siNA sense region
auaaaucaguguuuacauu

SEQ ID NO: 846 - RNA, 19 nt, Artificial Sequence
  Description of Artificial Sequence:  siNA antisense region
gauccucgcagggggaagg

SEQ ID NO: 847 - RNA, 19 nt, Artificial Sequence
  Description of Artificial Sequence:  siNA antisense region
ccaacccgggccaacggcg

SEQ ID NO: 848 - RNA, 19 nt, Artificial Sequence
  Description of Artificial Sequence:  siNA antisense region
caccgccgcuuuccaaagc

SEQ ID NO: 849 - RNA, 19 nt, Artificial Sequence
  Description of Artificial Sequence:  siNA antisense region
ccgagcccggcccaaagcc

SEQ ID NO: 850 - RNA, 19 nt, Artificial Sequence
  Description of Artificial Sequence:  siNA antisense region
ccccuggcguucccgaggc

SEQ ID NO: 851 - RNA, 19 nt, Artificial Sequence
  Description of Artificial Sequence:  siNA antisense region
cccguccgcacccaggggc

SEQ ID NO: 852 - RNA, 19 nt, Artificial Sequence
  Description of Artificial Sequence:  siNA antisense region
aacccccuccuggccgcgc

SEQ ID NO: 853 - RNA, 19 nt, Artificial Sequence
  Description of Artificial Sequence:  siNA antisense region
cgccgccgccugcgccuua

SEQ ID NO: 854 - RNA, 19 nt, Artificial Sequence
  Description of Artificial Sequence:  siNA antisense region
ccaggcccgcccccgcccc

SEQ ID NO: 855 - RNA, 19 nt, Artificial Sequence
  Description of Artificial Sequence:  siNA antisense region
gcccggagagggcgcccgc

SEQ ID NO: 856 - RNA, 19 nt, Artificial Sequence
  Description of Artificial Sequence:  siNA antisense region
cgcgccuguuaacaaaggg

SEQ ID NO: 857 - RNA, 19 nt, Artificial Sequence
  Description of Artificial Sequence:  siNA antisense region
cgucuccgcuggccgggac

SEQ ID NO: 858 - RNA, 19 nt, Artificial Sequence
  Description of Artificial Sequence:  siNA antisense region
gcccgcccagggcggccgc

SEQ ID NO: 859 - RNA, 19 nt, Artificial Sequence
  Description of Artificial Sequence:  siNA antisense region
ccgccgcccgccgcccgcg

SEQ ID NO: 860 - RNA, 19 nt, Artificial Sequence
  Description of Artificial Sequence:  siNA antisense region
ccccgcaggccgcccucac

SEQ ID NO: 861 - RNA, 19 nt, Artificial Sequence
  Description of Artificial Sequence:  siNA antisense region
cccggcccccgggcgccgc

SEQ ID NO: 862 - RNA, 19 nt, Artificial Sequence
  Description of Artificial Sequence:  siNA antisense region
ggcucaggcccggcucggc

SEQ ID NO: 863 - RNA, 19 nt, Artificial Sequence
  Description of Artificial Sequence:  siNA antisense region
ccagcucgguccgggcccg

SEQ ID NO: 864 - RNA, 19 nt, Artificial Sequence
  Description of Artificial Sequence:  siNA antisense region
cgggccggagccccucucc

SEQ ID NO: 865 - RNA, 19 nt, Artificial Sequence
  Description of Artificial Sequence:  siNA antisense region
uugcgccaagcgaacgauc

SEQ ID NO: 866 - RNA, 19 nt, Artificial Sequence
  Description of Artificial Sequence:  siNA antisense region
aggcagaucuccaacauuu

SEQ ID NO: 867 - RNA, 19 nt, Artificial Sequence
  Description of Artificial Sequence:  siNA antisense region
uugcagcccaccagcuuca

SEQ ID NO: 868 - RNA, 19 nt, Artificial Sequence
  Description of Artificial Sequence:  siNA antisense region
gacagccccuucuuggauu

SEQ ID NO: 869 - RNA, 19 nt, Artificial Sequence
  Description of Artificial Sequence:  siNA antisense region
uaacagcuggaggacgagg

SEQ ID NO: 870 - RNA, 19 nt, Artificial Sequence
  Description of Artificial Sequence:  siNA antisense region
ugaagggcuucuuccagau

SEQ ID NO: 871 - RNA, 19 nt, Artificial Sequence
  Description of Artificial Sequence:  siNA antisense region
ucagaugcuacuggccgcu

SEQ ID NO: 872 - RNA, 19 nt, Artificial Sequence
  Description of Artificial Sequence:  siNA antisense region
agacccugaggcucaaagu

SEQ ID NO: 873 - RNA, 19 nt, Artificial Sequence
  Description of Artificial Sequence:  siNA antisense region
caacgagcggcuucacuca

SEQ ID NO: 874 - RNA, 19 nt, Artificial Sequence
  Description of Artificial Sequence:  siNA antisense region
agguuuuccuuggaguucc

SEQ ID NO: 875 - RNA, 19 nt, Artificial Sequence
  Description of Artificial Sequence:  siNA antisense region
ucacuggguccagcgagaa

SEQ ID NO: 876 - RNA, 19 nt, Artificial Sequence
  Description of Artificial Sequence:  siNA antisense region
aaaagguuggggucauuuu

SEQ ID NO: 877 - RNA, 19 nt, Artificial Sequence
  Description of Artificial Sequence:  siNA antisense region
aaaucauacagugcaacga

SEQ ID NO: 878 - RNA, 19 nt, Artificial Sequence
  Description of Artificial Sequence:  siNA antisense region
uuaucuccacuggccacaa

SEQ ID NO: 879 - RNA, 19 nt, Artificial Sequence
  Description of Artificial Sequence:  siNA antisense region
uuaguuaugcuuagagugu

SEQ ID NO: 880 - RNA, 19 nt, Artificial Sequence
  Description of Artificial Sequence:  siNA antisense region
acccggagcuuuucaccuu

SEQ ID NO: 881 - RNA, 19 nt, Artificial Sequence
  Description of Artificial Sequence:  siNA antisense region
uugugauuauagccuaaga

SEQ ID NO: 882 - RNA, 19 nt, Artificial Sequence
  Description of Artificial Sequence:  siNA antisense region
gcuucacaccauuccccau

SEQ ID NO: 883 - RNA, 19 nt, Artificial Sequence
  Description of Artificial Sequence:  siNA antisense region
uggccauuuuugguuuggg

SEQ ID NO: 884 - RNA, 19 nt, Artificial Sequence
  Description of Artificial Sequence:  siNA antisense region
uugcuugggacccagccuu

SEQ ID NO: 885 - RNA, 19 nt, Artificial Sequence
  Description of Artificial Sequence:  siNA antisense region
uugacuggcgugauguagu

SEQ ID NO: 886 - RNA, 19 nt, Artificial Sequence
  Description of Artificial Sequence:  siNA antisense region
gaguguuucuccagacugu

SEQ ID NO: 887 - RNA, 19 nt, Artificial Sequence
  Description of Artificial Sequence:  siNA antisense region
acaggcccaugguaccagg

SEQ ID NO: 888 - RNA, 19 nt, Artificial Sequence
  Description of Artificial Sequence:  siNA antisense region
ucagcggcauugcgggaca

SEQ ID NO: 889 - RNA, 19 nt, Artificial Sequence
  Description of Artificial Sequence:  siNA antisense region
ccgcugcucagcggauacu

SEQ ID NO: 890 - RNA, 19 nt, Artificial Sequence
  Description of Artificial Sequence:  siNA antisense region
aagaagcugccauugaucc

SEQ ID NO: 891 - RNA, 19 nt, Artificial Sequence
  Description of Artificial Sequence:  siNA antisense region
cucucacucucacgcacca

SEQ ID NO: 892 - RNA, 19 nt, Artificial Sequence
  Description of Artificial Sequence:  siNA antisense region
gaccucuggcuaggacugc

SEQ ID NO: 893 - RNA, 19 nt, Artificial Sequence
  Description of Artificial Sequence:  siNA antisense region
ucguaucucagcgagaugg

SEQ ID NO: 894 - RNA, 19 nt, Artificial Sequence
  Description of Artificial Sequence:  siNA antisense region
uaaugguacacccucccuu

SEQ ID NO: 895 - RNA, 19 nt, Artificial Sequence
  Description of Artificial Sequence:  siNA antisense region
gaagcaguguugauccugu

SEQ ID NO: 896 - RNA, 19 nt, Artificial Sequence
  Description of Artificial Sequence:  siNA antisense region
acguagagcuugccaucag

SEQ ID NO: 897 - RNA, 19 nt, Artificial Sequence
  Description of Artificial Sequence:  siNA antisense region
aagcggcucucggaggaga

SEQ ID NO: 898 - RNA, 19 nt, Artificial Sequence
  Description of Artificial Sequence:  siNA antisense region
aacucggccaggguguuga

SEQ ID NO: 899 - RNA, 19 nt, Artificial Sequence
  Description of Artificial Sequence:  siNA antisense region
guugaaugaugaugaacca

SEQ ID NO: 900 - RNA, 19 nt, Artificial Sequence
  Description of Artificial Sequence:  siNA antisense region
augagcccgucggccaccg

SEQ ID NO: 901 - RNA, 19 nt, Artificial Sequence
  Description of Artificial Sequence:  siNA antisense region
ggauaauggagcgugguga

SEQ ID NO: 902 - RNA, 19 nt, Artificial Sequence
  Description of Artificial Sequence:  siNA antisense region
uuguugcgcuuuggggcug

SEQ ID NO: 903 - RNA, 19 nt, Artificial Sequence
  Description of Artificial Sequence:  siNA antisense region
acaccauagacagugggcu

SEQ ID NO: 904 - RNA, 19 nt, Artificial Sequence
  Description of Artificial Sequence:  siNA antisense region
uugucguaguugggggaca

SEQ ID NO: 905 - RNA, 19 nt, Artificial Sequence
  Description of Artificial Sequence:  siNA antisense region
gugcguuccaucucccacu

SEQ ID NO: 906 - RNA, 19 nt, Artificial Sequence
  Description of Artificial Sequence:  siNA antisense region
ugcuucauggugauguccg

SEQ ID NO: 907 - RNA, 19 nt, Artificial Sequence
  Description of Artificial Sequence:  siNA antisense region
uggcccccgcccagcuugu

SEQ ID NO: 908 - RNA, 19 nt, Artificial Sequence
  Description of Artificial Sequence:  siNA antisense region
ucguacaccuccccguacu

SEQ ID NO: 909 - RNA, 19 nt, Artificial Sequence
  Description of Artificial Sequence:  siNA antisense region
uauuucuuccacacgcccu

SEQ ID NO: 910 - RNA, 19 nt, Artificial Sequence
  Description of Artificial Sequence:  siNA antisense region
acggccaccgucaggcugu

SEQ ID NO: 911 - RNA, 19 nt, Artificial Sequence
  Description of Artificial Sequence:  siNA antisense region
uccuccuucaaggucuuca

SEQ ID NO: 912 - RNA, 19 nt, Artificial Sequence
  Description of Artificial Sequence:  siNA antisense region
ucuuccaccuccauggugu

SEQ ID NO: 913 - RNA, 19 nt, Artificial Sequence
  Description of Artificial Sequence:  siNA antisense region
gcagcuucuuucaagaacu

SEQ ID NO: 914 - RNA, 19 nt, Artificial Sequence
  Description of Artificial Sequence:  siNA antisense region
uugaucucuuucaugacug

SEQ ID NO: 915 - RNA, 19 nt, Artificial Sequence
  Description of Artificial Sequence:  siNA antisense region
ugcacuagguuaggguguu

SEQ ID NO: 916 - RNA, 19 nt, Artificial Sequence
  Description of Artificial Sequence:  siNA antisense region
gugcagaccccaaggagcu

SEQ ID NO: 917 - RNA, 19 nt, Artificial Sequence
  Description of Artificial Sequence:  siNA antisense region
uagaacgggggcucccggg

SEQ ID NO: 918 - RNA, 19 nt, Artificial Sequence
  Description of Artificial Sequence:  siNA antisense region
augaacucagugaugauau

SEQ ID NO: 919 - RNA, 19 nt, Artificial Sequence
  Description of Artificial Sequence:  siNA antisense region
aggagguucccguagguca

SEQ ID NO: 920 - RNA, 19 nt, Artificial Sequence
  Description of Artificial Sequence:  siNA antisense region
cacucccucagguagucca

SEQ ID NO: 921 - RNA, 19 nt, Artificial Sequence
  Description of Artificial Sequence:  siNA antisense region
uucaccuccugccgguugc

SEQ ID NO: 922 - RNA, 19 nt, Artificial Sequence
  Description of Artificial Sequence:  siNA antisense region
uacagcagcaccacggcgu

SEQ ID NO: 923 - RNA, 19 nt, Artificial Sequence
  Description of Artificial Sequence:  siNA antisense region
gagaucugaguggccaugu

SEQ ID NO: 924 - RNA, 19 nt, Artificial Sequence
  Description of Artificial Sequence:  siNA antisense region
agguacuccauggcugacg

SEQ ID NO: 925 - RNA, 19 nt, Artificial Sequence
  Description of Artificial Sequence:  siNA antisense region
augaaguuuuucuucucua

SEQ ID NO: 926 - RNA, 19 nt, Artificial Sequence
  Description of Artificial Sequence:  siNA antisense region
gcagcaagaucucugugga

SEQ ID NO: 927 - RNA, 19 nt, Artificial Sequence
  Description of Artificial Sequence:  siNA antisense region
ccuaccaggcaguuucggg

SEQ ID NO: 928 - RNA, 19 nt, Artificial Sequence
  Description of Artificial Sequence:  siNA antisense region
uucaccaagugguucuccc

SEQ ID NO: 929 - RNA, 19 nt, Artificial Sequence
  Description of Artificial Sequence:  siNA antisense region
aggccaaaaucagcuaccu

SEQ ID NO: 930 - RNA, 19 nt, Artificial Sequence
  Description of Artificial Sequence:  siNA antisense region
ccugucaucaaccugcuca

SEQ ID NO: 931 - RNA, 19 nt, Artificial Sequence
  Description of Artificial Sequence:  siNA antisense region
ugggcuguguagguguccc

SEQ ID NO: 932 - RNA, 19 nt, Artificial Sequence
  Description of Artificial Sequence:  siNA antisense region
gggaacuuggcuccagcau

SEQ ID NO: 933 - RNA, 19 nt, Artificial Sequence
  Description of Artificial Sequence:  siNA antisense region
ggugcaguccauuugaugg

SEQ ID NO: 934 - RNA, 19 nt, Artificial Sequence
  Description of Artificial Sequence:  siNA antisense region
uuguaggccaggcucucgg

SEQ ID NO: 935 - RNA, 19 nt, Artificial Sequence
  Description of Artificial Sequence:  siNA antisense region
gacuugauggagaacuugu

SEQ ID NO: 936 - RNA, 19 nt, Artificial Sequence
  Description of Artificial Sequence:  siNA antisense region
ccaaaugcccagacgucgg

SEQ ID NO: 937 - RNA, 19 nt, Artificial Sequence
  Description of Artificial Sequence:  siNA antisense region
auuucccaaagcaauacuc

SEQ ID NO: 938 - RNA, 19 nt, Artificial Sequence
  Description of Artificial Sequence:  siNA antisense region
gacaugccauagguagcaa

SEQ ID NO: 939 - RNA, 19 nt, Artificial Sequence
  Description of Artificial Sequence:  siNA antisense region
ucaauucccggguaagggg

SEQ ID NO: 940 - RNA, 19 nt, Artificial Sequence
  Description of Artificial Sequence:  siNA antisense region
ucauacaccugggaacggu

SEQ ID NO: 941 - RNA, 19 nt, Artificial Sequence
  Description of Artificial Sequence:  siNA antisense region
uaguccuucucuagcagcu

SEQ ID NO: 942 - RNA, 19 nt, Artificial Sequence
  Description of Artificial Sequence:  siNA antisense region
ucugggcgcuucaugcggu

SEQ ID NO: 943 - RNA, 19 nt, Artificial Sequence
  Description of Artificial Sequence:  siNA antisense region
accuucucugggcagccuu

SEQ ID NO: 944 - RNA, 19 nt, Artificial Sequence
  Description of Artificial Sequence:  siNA antisense region
gcucgcaugaguucauaga

SEQ ID NO: 945 - RNA, 19 nt, Artificial Sequence
  Description of Artificial Sequence:  siNA antisense region
ggauuccacugccaacaug

SEQ ID NO: 946 - RNA, 19 nt, Artificial Sequence
  Description of Artificial Sequence:  siNA antisense region
aaggagggccggucagagg

SEQ ID NO: 947 - RNA, 19 nt, Artificial Sequence
  Description of Artificial Sequence:  siNA antisense region
gcuugguggauuucagcaa

SEQ ID NO: 948 - RNA, 19 nt, Artificial Sequence
  Description of Artificial Sequence:  siNA antisense region
uggaacauuguuucaaagg

SEQ ID NO: 949 - RNA, 19 nt, Artificial Sequence
  Description of Artificial Sequence:  siNA antisense region
ucugagauacuggauuccu

SEQ ID NO: 950 - RNA, 19 nt, Artificial Sequence
  Description of Artificial Sequence:  siNA antisense region
agcuccuuuuccacuucgu

SEQ ID NO: 951 - RNA, 19 nt, Artificial Sequence
  Description of Artificial Sequence:  siNA antisense region
cggacgccuuguuucccca

SEQ ID NO: 952 - RNA, 19 nt, Artificial Sequence
  Description of Artificial Sequence:  siNA antisense region
aagguagucacagccccac

SEQ ID NO: 953 - RNA, 19 nt, Artificial Sequence
  Description of Artificial Sequence:  siNA antisense region
agcucuggggccugcagca

SEQ ID NO: 954 - RNA, 19 nt, Artificial Sequence
  Description of Artificial Sequence:  siNA antisense region
guccucgucuuggugggca

SEQ ID NO: 955 - RNA, 19 nt, Artificial Sequence
  Description of Artificial Sequence:  siNA antisense region
ucugcagcucuccuggagg

SEQ ID NO: 956 - RNA, 19 nt, Artificial Sequence
  Description of Artificial Sequence:  siNA antisense region
ucaguggugucucugugcu

SEQ ID NO: 957 - RNA, 19 nt, Artificial Sequence
  Description of Artificial Sequence:  siNA antisense region
ugaggcaucucaggcacgu

SEQ ID NO: 958 - RNA, 19 nt, Artificial Sequence
  Description of Artificial Sequence:  siNA antisense region
ucucccuggcccuuggagu

SEQ ID NO: 959 - RNA, 19 nt, Artificial Sequence
  Description of Artificial Sequence:  siNA antisense region
ugguccagaggaucgcucu

SEQ ID NO: 960 - RNA, 19 nt, Artificial Sequence
  Description of Artificial Sequence:  siNA antisense region
ggagacacggcaggcucau

SEQ ID NO: 961 - RNA, 19 nt, Artificial Sequence
  Description of Artificial Sequence:  siNA antisense region
ucuuuucgagggagcaaug

SEQ ID NO: 962 - RNA, 19 nt, Artificial Sequence
  Description of Artificial Sequence:  siNA antisense region
cccuccgggggaccucgcu

SEQ ID NO: 963 - RNA, 19 nt, Artificial Sequence
  Description of Artificial Sequence:  siNA antisense region
ucaucuucauucaggccgc

SEQ ID NO: 964 - RNA, 19 nt, Artificial Sequence
  Description of Artificial Sequence:  siNA antisense region
ucuuuggggagaaggcgcu

SEQ ID NO: 965 - RNA, 19 nt, Artificial Sequence
  Description of Artificial Sequence:  siNA antisense region
aacaaguuggucuuuuugu

SEQ ID NO: 966 - RNA, 19 nt, Artificial Sequence
  Description of Artificial Sequence:  siNA antisense region
uucuugaucaaggcgcuga

SEQ ID NO: 967 - RNA, 19 nt, Artificial Sequence
  Description of Artificial Sequence:  siNA antisense region
ggggcugucuucuucuucu

SEQ ID NO: 968 - RNA, 19 nt, Artificial Sequence
  Description of Artificial Sequence:  siNA antisense region
cugcguuugggagggguug

SEQ ID NO: 969 - RNA, 19 nt, Artificial Sequence
  Description of Artificial Sequence:  siNA antisense region
aucucccggaaggagcugc

SEQ ID NO: 970 - RNA, 19 nt, Artificial Sequence
  Description of Artificial Sequence:  siNA antisense region
cgcuccggcuggccgucca

SEQ ID NO: 971 - RNA, 19 nt, Artificial Sequence
  Description of Artificial Sequence:  siNA antisense region
uccucgccggccccucugc

SEQ ID NO: 972 - RNA, 19 nt, Artificial Sequence
  Description of Artificial Sequence:  siNA antisense region
cugaugucucggcccucuu

SEQ ID NO: 973 - RNA, 19 nt, Artificial Sequence
  Description of Artificial Sequence:  siNA antisense region
aaagccagugccccguugc

SEQ ID NO: 974 - RNA, 19 nt, Artificial Sequence
  Description of Artificial Sequence:  siNA antisense region
gcuguguccaaggggguga

SEQ ID NO: 975 - RNA, 19 nt, Artificial Sequence
  Description of Artificial Sequence:  siNA antisense region
ggggacuuggcugggucag

SEQ ID NO: 976 - RNA, 19 nt, Artificial Sequence
  Description of Artificial Sequence:  siNA antisense region
gccccauugcugggcuuug

SEQ ID NO: 977 - RNA, 19 nt, Artificial Sequence
  Description of Artificial Sequence:  siNA antisense region
gcuccauuggggaccccag

SEQ ID NO: 978 - RNA, 19 nt, Artificial Sequence
  Description of Artificial Sequence:  siNA antisense region
cccccggacucccggaggg

SEQ ID NO: 979 - RNA, 19 nt, Artificial Sequence
  Description of Artificial Sequence:  siNA antisense region
ggagaccggaagccugagc

SEQ ID NO: 980 - RNA, 19 nt, Artificial Sequence
  Description of Artificial Sequence:  siNA antisense region
gacuucuuccacagguggg

SEQ ID NO: 981 - RNA, 19 nt, Artificial Sequence
  Description of Artificial Sequence:  siNA antisense region
cugcuggucagcgugcugg

SEQ ID NO: 982 - RNA, 19 nt, Artificial Sequence
  Description of Artificial Sequence:  siNA antisense region
ucgccgguggcuaggcggc

SEQ ID NO: 983 - RNA, 19 nt, Artificial Sequence
  Description of Artificial Sequence:  siNA antisense region
cugccaccgcccuccuccu

SEQ ID NO: 984 - RNA, 19 nt, Artificial Sequence
  Description of Artificial Sequence:  siNA antisense region
aggaagcgcuugcuggagc

SEQ ID NO: 985 - RNA, 19 nt, Artificial Sequence
  Description of Artificial Sequence:  siNA antisense region
gagacggagcaagagcgca

SEQ ID NO: 986 - RNA, 19 nt, Artificial Sequence
  Description of Artificial Sequence:  siNA antisense region
gccccauggggaacgcagg

SEQ ID NO: 987 - RNA, 19 nt, Artificial Sequence
  Description of Artificial Sequence:  siNA antisense region
cuccacuccguguccuugg

SEQ ID NO: 988 - RNA, 19 nt, Artificial Sequence
  Description of Artificial Sequence:  siNA antisense region
cgaggcagcgugacugacc

SEQ ID NO: 989 - RNA, 19 nt, Artificial Sequence
  Description of Artificial Sequence:  siNA antisense region
cccguggacugcaaguccc

SEQ ID NO: 990 - RNA, 19 nt, Artificial Sequence
  Description of Artificial Sequence:  siNA antisense region
gacgagucaaacugucuuc

SEQ ID NO: 991 - RNA, 19 nt, Artificial Sequence
  Description of Artificial Sequence:  siNA antisense region
uugugcccuccaaaugugg

SEQ ID NO: 992 - RNA, 19 nt, Artificial Sequence
  Description of Artificial Sequence:  siNA antisense region
agagccggcuucucacuuu

SEQ ID NO: 993 - RNA, 19 nt, Artificial Sequence
  Description of Artificial Sequence:  siNA antisense region
ccugcccucuuccgaggca

SEQ ID NO: 994 - RNA, 19 nt, Artificial Sequence
  Description of Artificial Sequence:  siNA antisense region
uggucagaccuguucuccc

SEQ ID NO: 995 - RNA, 19 nt, Artificial Sequence
  Description of Artificial Sequence:  siNA antisense region
acugugccucgggucaccu

SEQ ID NO: 996 - RNA, 19 nt, Artificial Sequence
  Description of Artificial Sequence:  siNA antisense region
agccuggggggaggcguua

SEQ ID NO: 997 - RNA, 19 nt, Artificial Sequence
  Description of Artificial Sequence:  siNA antisense region
uccucauucuuuuucacca

SEQ ID NO: 998 - RNA, 19 nt, Artificial Sequence
  Description of Artificial Sequence:  siNA antisense region
aagaccucaucagcagcuu

SEQ ID NO: 999 - RNA, 19 nt, Artificial Sequence
  Description of Artificial Sequence:  siNA antisense region
gacuccaugaugucuuuga

SEQ ID NO: 1000 - RNA, 19 nt, Artificial Sequence
  Description of Artificial Sequence:  siNA antisense region
gggcuggagcccgggcugg

SEQ ID NO: 1001 - RNA, 19 nt, Artificial Sequence
  Description of Artificial Sequence:  siNA antisense region
uuuggagucagguugggcg

SEQ ID NO: 1002 - RNA, 19 nt, Artificial Sequence
  Description of Artificial Sequence:  siNA antisense region
accugccgccggagggguu

SEQ ID NO: 1003 - RNA, 19 nt, Artificial Sequence
  Description of Artificial Sequence:  siNA antisense region
gaggcaggggccacgguga

SEQ ID NO: 1004 - RNA, 19 nt, Artificial Sequence
  Description of Artificial Sequence:  siNA antisense region
uccuugugggggaggcccg

SEQ ID NO: 1005 - RNA, 19 nt, Artificial Sequence
  Description of Artificial Sequence:  siNA antisense region
cugccuuuccaggcuucuu

SEQ ID NO: 1006 - RNA, 19 nt, Artificial Sequence
  Description of Artificial Sequence:  siNA antisense region
gcaggggucccuaaggcac

SEQ ID NO: 1007 - RNA, 19 nt, Artificial Sequence
  Description of Artificial Sequence:  siNA antisense region
gucacuggcucagcugcag

SEQ ID NO: 1008 - RNA, 19 nt, Artificial Sequence
  Description of Artificial Sequence:  siNA antisense region
ccugcuuugcugguggggg

SEQ ID NO: 1009 - RNA, 19 nt, Artificial Sequence
  Description of Artificial Sequence:  siNA antisense region
ccccuuggugcaccugagc

SEQ ID NO: 1010 - RNA, 19 nt, Artificial Sequence
  Description of Artificial Sequence:  siNA antisense region
gcggggcccuugcuggugc

SEQ ID NO: 1011 - RNA, 19 nt, Artificial Sequence
  Description of Artificial Sequence:  siNA antisense region
cucacucuggacuccucgg

SEQ ID NO: 1012 - RNA, 19 nt, Artificial Sequence
  Description of Artificial Sequence:  siNA antisense region
gaggagugcuugugccucc

SEQ ID NO: 1013 - RNA, 19 nt, Artificial Sequence
  Description of Artificial Sequence:  siNA antisense region
ucccucccuggcgacucag

SEQ ID NO: 1014 - RNA, 19 nt, Artificial Sequence
  Description of Artificial Sequence:  siNA antisense region
uuggacaauuuccccuugu

SEQ ID NO: 1015 - RNA, 19 nt, Artificial Sequence
  Description of Artificial Sequence:  siNA antisense region
ggcggggcagguuugagcu

SEQ ID NO: 1016 - RNA, 19 nt, Artificial Sequence
  Description of Artificial Sequence:  siNA antisense region
gaggcugcuggugggggcg

SEQ ID NO: 1017 - RNA, 19 nt, Artificial Sequence
  Description of Artificial Sequence:  siNA antisense region
ccuccagccuucccugcag

SEQ ID NO: 1018 - RNA, 19 nt, Artificial Sequence
  Description of Artificial Sequence:  siNA antisense region
ggccucugcgagggcuuuc

SEQ ID NO: 1019 - RNA, 19 nt, Artificial Sequence
  Description of Artificial Sequence:  siNA antisense region
ccggcagccuccuggccgg

SEQ ID NO: 1020 - RNA, 19 nt, Artificial Sequence
  Description of Artificial Sequence:  siNA antisense region
gcgcccaagacugccuccc

SEQ ID NO: 1021 - RNA, 19 nt, Artificial Sequence
  Description of Artificial Sequence:  siNA antisense region
cucguggcuuuugucuuug

SEQ ID NO: 1022 - RNA, 19 nt, Artificial Sequence
  Description of Artificial Sequence:  siNA antisense region
uucacagcaucaaccagac

SEQ ID NO: 1023 - RNA, 19 nt, Artificial Sequence
  Description of Artificial Sequence:  siNA antisense region
ggcuuggcagcgucacugu

SEQ ID NO: 1024 - RNA, 19 nt, Artificial Sequence
  Description of Artificial Sequence:  siNA antisense region
cccucugccggcuggcugg

SEQ ID NO: 1025 - RNA, 19 nt, Artificial Sequence
  Description of Artificial Sequence:  siNA antisense region
agcacgggcuuuuugaggc

SEQ ID NO: 1026 - RNA, 19 nt, Artificial Sequence
  Description of Artificial Sequence:  siNA antisense region
ggcuuuggaguggccggga

SEQ ID NO: 1027 - RNA, 19 nt, Artificial Sequence
  Description of Artificial Sequence:  siNA antisense region
gacggcuuggcggggugug

SEQ ID NO: 1028 - RNA, 19 nt, Artificial Sequence
  Description of Artificial Sequence:  siNA antisense region
gggcugauggggguccccg

SEQ ID NO: 1029 - RNA, 19 nt, Artificial Sequence
  Description of Artificial Sequence:  siNA antisense region
gaaaggggaacgggggcug

SEQ ID NO: 1030 - RNA, 19 nt, Artificial Sequence
  Description of Artificial Sequence:  siNA antisense region
gaugcugauggcaacgugg

SEQ ID NO: 1031 - RNA, 19 nt, Artificial Sequence
  Description of Artificial Sequence:  siNA antisense region
uccccugccaaggccgagg

SEQ ID NO: 1032 - RNA, 19 nt, Artificial Sequence
  Description of Artificial Sequence:  siNA antisense region
gcaguggaagacggcuggu

SEQ ID NO: 1033 - RNA, 19 nt, Artificial Sequence
  Description of Artificial Sequence:  siNA antisense region
gauaugagagggaugaagg

SEQ ID NO: 1034 - RNA, 19 nt, Artificial Sequence
  Description of Artificial Sequence:  siNA antisense region
cgaagagacacucggguug

SEQ ID NO: 1035 - RNA, 19 nt, Artificial Sequence
  Description of Artificial Sequence:  siNA antisense region
ggaggcuggcggguuuucc

SEQ ID NO: 1036 - RNA, 19 nt, Artificial Sequence
  Description of Artificial Sequence:  siNA antisense region
gcgccgcuggcccgcucug

SEQ ID NO: 1037 - RNA, 19 nt, Artificial Sequence
  Description of Artificial Sequence:  siNA antisense region
accacgcccuuggugaugg

SEQ ID NO: 1038 - RNA, 19 nt, Artificial Sequence
  Description of Artificial Sequence:  siNA antisense region
gccucggugcuguccaaga

SEQ ID NO: 1039 - RNA, 19 nt, Artificial Sequence
  Description of Artificial Sequence:  siNA antisense region
gagauggcgaggcacagcg

SEQ ID NO: 1040 - RNA, 19 nt, Artificial Sequence
  Description of Artificial Sequence:  siNA antisense region
aucugcucggaguucccag

SEQ ID NO: 1041 - RNA, 19 nt, Artificial Sequence
  Description of Artificial Sequence:  siNA antisense region
acugcgcuguggcuggcca

SEQ ID NO: 1042 - RNA, 19 nt, Artificial Sequence
  Description of Artificial Sequence:  siNA antisense region
uuuuugccggccuccagca

SEQ ID NO: 1043 - RNA, 19 nt, Artificial Sequence
  Description of Artificial Sequence:  siNA antisense region
acgcagaacguguagaggu

SEQ ID NO: 1044 - RNA, 19 nt, Artificial Sequence
  Description of Artificial Sequence:  siNA antisense region
auggaauccacauagcuca

SEQ ID NO: 1045 - RNA, 19 nt, Artificial Sequence
  Description of Artificial Sequence:  siNA antisense region
uuguuccucauuugcugga

SEQ ID NO: 1046 - RNA, 19 nt, Artificial Sequence
  Description of Artificial Sequence:  siNA antisense region
gccucucggaaggcaaacu

SEQ ID NO: 1047 - RNA, 19 nt, Artificial Sequence
  Description of Artificial Sequence:  siNA antisense region
uucuccaguuuguugaugg

SEQ ID NO: 1048 - RNA, 19 nt, Artificial Sequence
  Description of Artificial Sequence:  siNA antisense region
ugaagcucccggagauuau

SEQ ID NO: 1049 - RNA, 19 nt, Artificial Sequence
  Description of Artificial Sequence:  siNA antisense region
gcugacgccgggcagaucu

SEQ ID NO: 1050 - RNA, 19 nt, Artificial Sequence
  Description of Artificial Sequence:  siNA antisense region
gccgccggaccacugccug

SEQ ID NO: 1051 - RNA, 19 nt, Artificial Sequence
  Description of Artificial Sequence:  siNA antisense region
uugcugaaguccugagugg

SEQ ID NO: 1052 - RNA, 19 nt, Artificial Sequence
  Description of Artificial Sequence:  siNA antisense region
uucaccgaacugaggagcu

SEQ ID NO: 1053 - RNA, 19 nt, Artificial Sequence
  Description of Artificial Sequence:  siNA antisense region
acuaugucacugauuuccu

SEQ ID NO: 1054 - RNA, 19 nt, Artificial Sequence
  Description of Artificial Sequence:  siNA antisense region
gacugcugcuaccucugca

SEQ ID NO: 1055 - RNA, 19 nt, Artificial Sequence
  Description of Artificial Sequence:  siNA antisense region
gccugacaccugaccccug

SEQ ID NO: 1056 - RNA, 19 nt, Artificial Sequence
  Description of Artificial Sequence:  siNA antisense region
ugcaggcagcuccgacggg

SEQ ID NO: 1057 - RNA, 19 nt, Artificial Sequence
  Description of Artificial Sequence:  siNA antisense region
gggcgagcccgcaugugcu

SEQ ID NO: 1058 - RNA, 19 nt, Artificial Sequence
  Description of Artificial Sequence:  siNA antisense region
agccacugucauggguaug

SEQ ID NO: 1059 - RNA, 19 nt, Artificial Sequence
  Description of Artificial Sequence:  siNA antisense region
acucacuagucccuucuca

SEQ ID NO: 1060 - RNA, 19 nt, Artificial Sequence
  Description of Artificial Sequence:  siNA antisense region
uccugggccaaggugcuga

SEQ ID NO: 1061 - RNA, 19 nt, Artificial Sequence
  Description of Artificial Sequence:  siNA antisense region
cucugccuggcgcagagcu

SEQ ID NO: 1062 - RNA, 19 nt, Artificial Sequence
  Description of Artificial Sequence:  siNA antisense region
acuccacagggcccucagc

SEQ ID NO: 1063 - RNA, 19 nt, Artificial Sequence
  Description of Artificial Sequence:  siNA antisense region
cguagguaguagagcugga

SEQ ID NO: 1064 - RNA, 19 nt, Artificial Sequence
  Description of Artificial Sequence:  siNA antisense region
gagggcaggcggugcaaac

SEQ ID NO: 1065 - RNA, 19 nt, Artificial Sequence
  Description of Artificial Sequence:  siNA antisense region
gggaggaggaaggugcggg

SEQ ID NO: 1066 - RNA, 19 nt, Artificial Sequence
  Description of Artificial Sequence:  siNA antisense region
gaggacagagacggagcgg

SEQ ID NO: 1067 - RNA, 19 nt, Artificial Sequence
  Description of Artificial Sequence:  siNA antisense region
acuccacagauaaaauucg

SEQ ID NO: 1068 - RNA, 19 nt, Artificial Sequence
  Description of Artificial Sequence:  siNA antisense region
gcaguccacggagcaggaa

SEQ ID NO: 1069 - RNA, 19 nt, Artificial Sequence
  Description of Artificial Sequence:  siNA antisense region
gguccuggcaugccgacug

SEQ ID NO: 1070 - RNA, 19 nt, Artificial Sequence
  Description of Artificial Sequence:  siNA antisense region
gugggagcggggcuggcgg

SEQ ID NO: 1071 - RNA, 19 nt, Artificial Sequence
  Description of Artificial Sequence:  siNA antisense region
cucagucuggggcacuagg

SEQ ID NO: 1072 - RNA, 19 nt, Artificial Sequence
  Description of Artificial Sequence:  siNA antisense region
cccaccuggccuggagagc

SEQ ID NO: 1073 - RNA, 19 nt, Artificial Sequence
  Description of Artificial Sequence:  siNA antisense region
caguccacaucagccguuc

SEQ ID NO: 1074 - RNA, 19 nt, Artificial Sequence
  Description of Artificial Sequence:  siNA antisense region
agaaaaaaaugaaaaagac

SEQ ID NO: 1075 - RNA, 19 nt, Artificial Sequence
  Description of Artificial Sequence:  siNA antisense region
ggaggaggggcuccagaga

SEQ ID NO: 1076 - RNA, 19 nt, Artificial Sequence
  Description of Artificial Sequence:  siNA antisense region
gaaggaggcccagccgggg

SEQ ID NO: 1077 - RNA, 19 nt, Artificial Sequence
  Description of Artificial Sequence:  siNA antisense region
auucuuggagaaguggaag

SEQ ID NO: 1078 - RNA, 19 nt, Artificial Sequence
  Description of Artificial Sequence:  siNA antisense region
gccucaguucaggcuucca

SEQ ID NO: 1079 - RNA, 19 nt, Artificial Sequence
  Description of Artificial Sequence:  siNA antisense region
gagggccugacacacaagg

SEQ ID NO: 1080 - RNA, 19 nt, Artificial Sequence
  Description of Artificial Sequence:  siNA antisense region
ggccagggagugcaggcag

SEQ ID NO: 1081 - RNA, 19 nt, Artificial Sequence
  Description of Artificial Sequence:  siNA antisense region
ucagcacacgacgggcaag

SEQ ID NO: 1082 - RNA, 19 nt, Artificial Sequence
  Description of Artificial Sequence:  siNA antisense region
gguucuugaaacaugucuu

SEQ ID NO: 1083 - RNA, 19 nt, Artificial Sequence
  Description of Artificial Sequence:  siNA antisense region
ugcccuucccgaaauggcg

SEQ ID NO: 1084 - RNA, 19 nt, Artificial Sequence
  Description of Artificial Sequence:  siNA antisense region
gugugcauggcccgugcau

SEQ ID NO: 1085 - RNA, 19 nt, Artificial Sequence
  Description of Artificial Sequence:  siNA antisense region
agggcagagugaccagccg

SEQ ID NO: 1086 - RNA, 19 nt, Artificial Sequence
  Description of Artificial Sequence:  siNA antisense region
caccccgggcagcagcaga

SEQ ID NO: 1087 - RNA, 19 nt, Artificial Sequence
  Description of Artificial Sequence:  siNA antisense region
gaaauggcgagugcacccc

SEQ ID NO: 1088 - RNA, 19 nt, Artificial Sequence
  Description of Artificial Sequence:  siNA antisense region
agcuguccugcacgugagg

SEQ ID NO: 1089 - RNA, 19 nt, Artificial Sequence
  Description of Artificial Sequence:  siNA antisense region
uuuuccacccaaaucaaga

SEQ ID NO: 1090 - RNA, 19 nt, Artificial Sequence
  Description of Artificial Sequence:  siNA antisense region
guuggcuuuagcacccugu

SEQ ID NO: 1091 - RNA, 19 nt, Artificial Sequence
  Description of Artificial Sequence:  siNA antisense region
cccaggacccaaaggcugg

SEQ ID NO: 1092 - RNA, 19 nt, Artificial Sequence
  Description of Artificial Sequence:  siNA antisense region
cuuuucagcucccaccugc

SEQ ID NO: 1093 - RNA, 19 nt, Artificial Sequence
  Description of Artificial Sequence:  siNA antisense region
augccccaugccucgaucc

SEQ ID NO: 1094 - RNA, 19 nt, Artificial Sequence
  Description of Artificial Sequence:  siNA antisense region
uggacagauggaaaggaca

SEQ ID NO: 1095 - RNA, 19 nt, Artificial Sequence
  Description of Artificial Sequence:  siNA antisense region
agcugggcucuggggaugu

SEQ ID NO: 1096 - RNA, 19 nt, Artificial Sequence
  Description of Artificial Sequence:  siNA antisense region
acgucacaagagagcaaga

SEQ ID NO: 1097 - RNA, 19 nt, Artificial Sequence
  Description of Artificial Sequence:  siNA antisense region
ugccaggauucacagugca

SEQ ID NO: 1098 - RNA, 19 nt, Artificial Sequence
  Description of Artificial Sequence:  siNA antisense region
uugagacucaagcuuucuu

SEQ ID NO: 1099 - RNA, 19 nt, Artificial Sequence
  Description of Artificial Sequence:  siNA antisense region
gacagugaccugccacccu

SEQ ID NO: 1100 - RNA, 19 nt, Artificial Sequence
  Description of Artificial Sequence:  siNA antisense region
gggagggaugucggcagug

SEQ ID NO: 1101 - RNA, 19 nt, Artificial Sequence
  Description of Artificial Sequence:  siNA antisense region
cugccuccauucugcuggg

SEQ ID NO: 1102 - RNA, 19 nt, Artificial Sequence
  Description of Artificial Sequence:  siNA antisense region
cacugccucccuugucccc

SEQ ID NO: 1103 - RNA, 19 nt, Artificial Sequence
  Description of Artificial Sequence:  siNA antisense region
gcuguucaccccacuagcc

SEQ ID NO: 1104 - RNA, 19 nt, Artificial Sequence
  Description of Artificial Sequence:  siNA antisense region
uggggcuauuuggcaccag

SEQ ID NO: 1105 - RNA, 19 nt, Artificial Sequence
  Description of Artificial Sequence:  siNA antisense region
accugccugggcccagucu

SEQ ID NO: 1106 - RNA, 19 nt, Artificial Sequence
  Description of Artificial Sequence:  siNA antisense region
cacucugggcccuugcaga

SEQ ID NO: 1107 - RNA, 19 nt, Artificial Sequence
  Description of Artificial Sequence:  siNA antisense region
augugugaaaggacgguuc

SEQ ID NO: 1108 - RNA, 19 nt, Artificial Sequence
  Description of Artificial Sequence:  siNA antisense region
gcccuucagggcacccaga

SEQ ID NO: 1109 - RNA, 19 nt, Artificial Sequence
  Description of Artificial Sequence:  siNA antisense region
gagugggggaggggaaggg

SEQ ID NO: 1110 - RNA, 19 nt, Artificial Sequence
  Description of Artificial Sequence:  siNA antisense region
aucuacuuugucuuagagg

SEQ ID NO: 1111 - RNA, 19 nt, Artificial Sequence
  Description of Artificial Sequence:  siNA antisense region
ggaaagggccuuguaagaa

SEQ ID NO: 1112 - RNA, 19 nt, Artificial Sequence
  Description of Artificial Sequence:  siNA antisense region
aggcugucuuguuccaaag

SEQ ID NO: 1113 - RNA, 19 nt, Artificial Sequence
  Description of Artificial Sequence:  siNA antisense region
aagaacucagaaaagugaa

SEQ ID NO: 1114 - RNA, 19 nt, Artificial Sequence
  Description of Artificial Sequence:  siNA antisense region
agggcuuugaaaugcuuca

SEQ ID NO: 1115 - RNA, 19 nt, Artificial Sequence
  Description of Artificial Sequence:  siNA antisense region
gggcggcuacacagaggca

SEQ ID NO: 1116 - RNA, 19 nt, Artificial Sequence
  Description of Artificial Sequence:  siNA antisense region
cagcucuauucucucucag

SEQ ID NO: 1117 - RNA, 19 nt, Artificial Sequence
  Description of Artificial Sequence:  siNA antisense region
ucgcgaggugcccaguggc

SEQ ID NO: 1118 - RNA, 19 nt, Artificial Sequence
  Description of Artificial Sequence:  siNA antisense region
gcccuuuccucccaccugu

SEQ ID NO: 1119 - RNA, 19 nt, Artificial Sequence
  Description of Artificial Sequence:  siNA antisense region
aggaccaggacugcgcagg

SEQ ID NO: 1120 - RNA, 19 nt, Artificial Sequence
  Description of Artificial Sequence:  siNA antisense region
caguucaagagugcagcca

SEQ ID NO: 1121 - RNA, 19 nt, Artificial Sequence
  Description of Artificial Sequence:  siNA antisense region
uuaaauaagacauucgccc

SEQ ID NO: 1122 - RNA, 19 nt, Artificial Sequence
  Description of Artificial Sequence:  siNA antisense region
cuaugucacucacgguaau

SEQ ID NO: 1123 - RNA, 19 nt, Artificial Sequence
  Description of Artificial Sequence:  siNA antisense region
cccccacagaacaugaggc

SEQ ID NO: 1124 - RNA, 19 nt, Artificial Sequence
  Description of Artificial Sequence:  siNA antisense region
ccuaacccucccugaugac

SEQ ID NO: 1125 - RNA, 19 nt, Artificial Sequence
  Description of Artificial Sequence:  siNA antisense region
ggcuccguuugugguuuuc

SEQ ID NO: 1126 - RNA, 19 nt, Artificial Sequence
  Description of Artificial Sequence:  siNA antisense region
auacgugaggcuuucaggg

SEQ ID NO: 1127 - RNA, 19 nt, Artificial Sequence
  Description of Artificial Sequence:  siNA antisense region
gcaggcgugcucugugaaa

SEQ ID NO: 1128 - RNA, 19 nt, Artificial Sequence
  Description of Artificial Sequence:  siNA antisense region
agccucggggagaagaugg

SEQ ID NO: 1129 - RNA, 19 nt, Artificial Sequence
  Description of Artificial Sequence:  siNA antisense region
ugggcuccggccuggggca

SEQ ID NO: 1130 - RNA, 19 nt, Artificial Sequence
  Description of Artificial Sequence:  siNA antisense region
ucacagcccgccgguaucu

SEQ ID NO: 1131 - RNA, 19 nt, Artificial Sequence
  Description of Artificial Sequence:  siNA antisense region
ccgggucccugcccagagu

SEQ ID NO: 1132 - RNA, 19 nt, Artificial Sequence
  Description of Artificial Sequence:  siNA antisense region
gucaagguccaggagaccc

SEQ ID NO: 1133 - RNA, 19 nt, Artificial Sequence
  Description of Artificial Sequence:  siNA antisense region
cucggaguuagcugcucug

SEQ ID NO: 1134 - RNA, 19 nt, Artificial Sequence
  Description of Artificial Sequence:  siNA antisense region
ggccaccugcccacugcuc

SEQ ID NO: 1135 - RNA, 19 nt, Artificial Sequence
  Description of Artificial Sequence:  siNA antisense region
gcgugaagccucaggggcg

SEQ ID NO: 1136 - RNA, 19 nt, Artificial Sequence
  Description of Artificial Sequence:  siNA antisense region
gggaagguggcuucuccgg

SEQ ID NO: 1137 - RNA, 19 nt, Artificial Sequence
  Description of Artificial Sequence:  siNA antisense region
gaggcgguaugaaggggcg

SEQ ID NO: 1138 - RNA, 19 nt, Artificial Sequence
  Description of Artificial Sequence:  siNA antisense region
gugcgaggcugcuggcacg

SEQ ID NO: 1139 - RNA, 19 nt, Artificial Sequence
  Description of Artificial Sequence:  siNA antisense region
agcguaaagcuagggccug

SEQ ID NO: 1140 - RNA, 19 nt, Artificial Sequence
  Description of Artificial Sequence:  siNA antisense region
guacaaguuuaggugauga

SEQ ID NO: 1141 - RNA, 19 nt, Artificial Sequence
  Description of Artificial Sequence:  siNA antisense region
uucuaucagaaaaauaaag

SEQ ID NO: 1142 - RNA, 19 nt, Artificial Sequence
  Description of Artificial Sequence:  siNA antisense region
cgauccagaggaaaccauu

SEQ ID NO: 1143 - RNA, 19 nt, Artificial Sequence
  Description of Artificial Sequence:  siNA antisense region
uguaagaaccgcauaaaac

SEQ ID NO: 1144 - RNA, 19 nt, Artificial Sequence
  Description of Artificial Sequence:  siNA antisense region
gggaaagaggugaugugcu

SEQ ID NO: 1145 - RNA, 19 nt, Artificial Sequence
  Description of Artificial Sequence:  siNA antisense region
ugcgucacagccgucgggg

SEQ ID NO: 1146 - RNA, 19 nt, Artificial Sequence
  Description of Artificial Sequence:  siNA antisense region
ugacuagugccucuccgcu

SEQ ID NO: 1147 - RNA, 19 nt, Artificial Sequence
  Description of Artificial Sequence:  siNA antisense region
cuucaaggccgcugucggu

SEQ ID NO: 1148 - RNA, 19 nt, Artificial Sequence
  Description of Artificial Sequence:  siNA antisense region
gugggggcuuugcucuguc

SEQ ID NO: 1149 - RNA, 19 nt, Artificial Sequence
  Description of Artificial Sequence:  siNA antisense region
ggcagucgggggaccuggg

SEQ ID NO: 1150 - RNA, 19 nt, Artificial Sequence
  Description of Artificial Sequence:  siNA antisense region
caguaccucauggagacag

SEQ ID NO: 1151 - RNA, 19 nt, Artificial Sequence
  Description of Artificial Sequence:  siNA antisense region
uuaacaaaaggaagggacc

SEQ ID NO: 1152 - RNA, 19 nt, Artificial Sequence
  Description of Artificial Sequence:  siNA antisense region
auauaguggcacaucacgu

SEQ ID NO: 1153 - RNA, 19 nt, Artificial Sequence
  Description of Artificial Sequence:  siNA antisense region
ccaagagauacguguaaaa

SEQ ID NO: 1154 - RNA, 19 nt, Artificial Sequence
  Description of Artificial Sequence:  siNA antisense region
gucuauaaaagaugcauac

SEQ ID NO: 1155 - RNA, 19 nt, Artificial Sequence
  Description of Artificial Sequence:  siNA antisense region
cgccacuuagaaaagagcg

SEQ ID NO: 1156 - RNA, 19 nt, Artificial Sequence
  Description of Artificial Sequence:  siNA antisense region
ggcaggacgcuaugcacac

SEQ ID NO: 1157 - RNA, 19 nt, Artificial Sequence
  Description of Artificial Sequence:  siNA antisense region
acaggcccccgagggcagg

SEQ ID NO: 1158 - RNA, 19 nt, Artificial Sequence
  Description of Artificial Sequence:  siNA antisense region
agcagagggggagccacca

SEQ ID NO: 1159 - RNA, 19 nt, Artificial Sequence
  Description of Artificial Sequence:  siNA antisense region
augcacuggaccccgagaa

SEQ ID NO: 1160 - RNA, 19 nt, Artificial Sequence
  Description of Artificial Sequence:  siNA antisense region
aucauauacagaaacaaaa

SEQ ID NO: 1161 - RNA, 19 nt, Artificial Sequence
  Description of Artificial Sequence:  siNA antisense region
caaaaaaaaccacagagaa

SEQ ID NO: 1162 - RNA, 19 nt, Artificial Sequence
  Description of Artificial Sequence:  siNA antisense region
agaggacagauuuggauuc

SEQ ID NO: 1163 - RNA, 19 nt, Artificial Sequence
  Description of Artificial Sequence:  siNA antisense region
uuauuuaaaaaauacuaca

SEQ ID NO: 1164 - RNA, 19 nt, Artificial Sequence
  Description of Artificial Sequence:  siNA antisense region
aauguaaacacugauuuau

SEQ ID NO: 1165 - RNA, 19 nt, Artificial Sequence
  Description of Artificial Sequence:  Target Sequence/siNA sense region
ugaccaucaauaaggaaga

SEQ ID NO: 1166 - RNA, 19 nt, Artificial Sequence
  Description of Artificial Sequence:  Target Sequence/siNA sense region
gaccaucaauaaggaagaa

SEQ ID NO: 1167 - RNA, 19 nt, Artificial Sequence
  Description of Artificial Sequence:  Target Sequence/siNA sense region
accaucaauaaggaagaag

SEQ ID NO: 1168 - RNA, 19 nt, Artificial Sequence
  Description of Artificial Sequence:  Target Sequence/siNA sense region
ccaucaauaaggaagaagc

SEQ ID NO: 1169 - RNA, 19 nt, Artificial Sequence
  Description of Artificial Sequence:  Target Sequence/siNA sense region
caucaauaaggaagaagcc

SEQ ID NO: 1170 - RNA, 19 nt, Artificial Sequence
  Description of Artificial Sequence:  Target Sequence/siNA sense region
aucaauaaggaagaagccc

SEQ ID NO: 1171 - RNA, 19 nt, Artificial Sequence
  Description of Artificial Sequence:  Target Sequence/siNA sense region
ucaauaaggaagaagcccu

SEQ ID NO: 1172 - RNA, 19 nt, Artificial Sequence
  Description of Artificial Sequence:  Target Sequence/siNA sense region
caauaaggaagaagcccuu

SEQ ID NO: 1173 - RNA, 19 nt, Artificial Sequence
  Description of Artificial Sequence:  Target Sequence/siNA sense region
aauaaggaagaagcccuuc

SEQ ID NO: 1174 - RNA, 19 nt, Artificial Sequence
  Description of Artificial Sequence:  Target Sequence/siNA sense region
auaaggaagaagcccuuca

SEQ ID NO: 1175 - RNA, 19 nt, Artificial Sequence
  Description of Artificial Sequence:  Target Sequence/siNA sense region
uaaggaagaagcccuucag

SEQ ID NO: 1176 - RNA, 19 nt, Artificial Sequence
  Description of Artificial Sequence:  Target Sequence/siNA sense region
aaggaagaagcccuucagc

SEQ ID NO: 1177 - RNA, 19 nt, Artificial Sequence
  Description of Artificial Sequence:  Target Sequence/siNA sense region
aggaagaagcccuucagcg

SEQ ID NO: 1178 - RNA, 19 nt, Artificial Sequence
  Description of Artificial Sequence:  Target Sequence/siNA sense region
ggaagaagcccuucagcgg

SEQ ID NO: 1179 - RNA, 19 nt, Artificial Sequence
  Description of Artificial Sequence:  Target Sequence/siNA sense region
gaagaagcccuucagcggc

SEQ ID NO: 1180 - RNA, 19 nt, Artificial Sequence
  Description of Artificial Sequence:  Target Sequence/siNA sense region
aagaagcccuucagcggcc

SEQ ID NO: 1181 - RNA, 19 nt, Artificial Sequence
  Description of Artificial Sequence:  Target Sequence/siNA sense region
agaagcccuucagcggcca

SEQ ID NO: 1182 - RNA, 19 nt, Artificial Sequence
  Description of Artificial Sequence:  Target Sequence/siNA sense region
gaagcccuucagcggccag

SEQ ID NO: 1183 - RNA, 19 nt, Artificial Sequence
  Description of Artificial Sequence:  siNA antisense region
ucuuccuuauugaugguca

SEQ ID NO: 1184 - RNA, 19 nt, Artificial Sequence
  Description of Artificial Sequence:  siNA antisense region
uucuuccuuauugaugguc

SEQ ID NO: 1185 - RNA, 19 nt, Artificial Sequence
  Description of Artificial Sequence:  siNA antisense region
cuucuuccuuauugauggu

SEQ ID NO: 1186 - RNA, 19 nt, Artificial Sequence
  Description of Artificial Sequence:  siNA antisense region
gcuucuuccuuauugaugg

SEQ ID NO: 1187 - RNA, 19 nt, Artificial Sequence
  Description of Artificial Sequence:  siNA antisense region
ggcuucuuccuuauugaug

SEQ ID NO: 1188 - RNA, 19 nt, Artificial Sequence
  Description of Artificial Sequence:  siNA antisense region
gggcuucuuccuuauugau

SEQ ID NO: 1189 - RNA, 19 nt, Artificial Sequence
  Description of Artificial Sequence:  siNA antisense region
agggcuucuuccuuauuga

SEQ ID NO: 1190 - RNA, 19 nt, Artificial Sequence
  Description of Artificial Sequence:  siNA antisense region
aagggcuucuuccuuauug

SEQ ID NO: 1191 - RNA, 19 nt, Artificial Sequence
  Description of Artificial Sequence:  siNA antisense region
gaagggcuucuuccuuauu

SEQ ID NO: 1192 - RNA, 19 nt, Artificial Sequence
  Description of Artificial Sequence:  siNA antisense region
ugaagggcuucuuccuuau

SEQ ID NO: 1193 - RNA, 19 nt, Artificial Sequence
  Description of Artificial Sequence:  siNA antisense region
cugaagggcuucuuccuua

SEQ ID NO: 1194 - RNA, 19 nt, Artificial Sequence
  Description of Artificial Sequence:  siNA antisense region
gcugaagggcuucuuccuu

SEQ ID NO: 1195 - RNA, 19 nt, Artificial Sequence
  Description of Artificial Sequence:  siNA antisense region
cgcugaagggcuucuuccu

SEQ ID NO: 1196 - RNA, 19 nt, Artificial Sequence
  Description of Artificial Sequence:  siNA antisense region
ccgcugaagggcuucuucc

SEQ ID NO: 1197 - RNA, 19 nt, Artificial Sequence
  Description of Artificial Sequence:  siNA antisense region
gccgcugaagggcuucuuc

SEQ ID NO: 1198 - RNA, 19 nt, Artificial Sequence
  Description of Artificial Sequence:  siNA antisense region
ggccgcugaagggcuucuu

SEQ ID NO: 1199 - RNA, 19 nt, Artificial Sequence
  Description of Artificial Sequence:  siNA antisense region
uggccgcugaagggcuucu

SEQ ID NO: 1200 - RNA, 19 nt, Artificial Sequence
  Description of Artificial Sequence:  siNA antisense region
cuggccgcugaagggcuuc

SEQ ID NO: 1201 - RNA, 19 nt, Artificial Sequence
  Description of Artificial Sequence:  Target Sequence/siNA sense region
gauuuaagcagaguucaaa

SEQ ID NO: 1202 - RNA, 19 nt, Artificial Sequence
  Description of Artificial Sequence:  Target Sequence/siNA sense region
auuuaagcagaguucaaaa

SEQ ID NO: 1203 - RNA, 19 nt, Artificial Sequence
  Description of Artificial Sequence:  Target Sequence/siNA sense region
uuuaagcagaguucaaaag

SEQ ID NO: 1204 - RNA, 19 nt, Artificial Sequence
  Description of Artificial Sequence:  Target Sequence/siNA sense region
uuaagcagaguucaaaagc

SEQ ID NO: 1205 - RNA, 19 nt, Artificial Sequence
  Description of Artificial Sequence:  Target Sequence/siNA sense region
uaagcagaguucaaaagcc

SEQ ID NO: 1206 - RNA, 19 nt, Artificial Sequence
  Description of Artificial Sequence:  Target Sequence/siNA sense region
aagcagaguucaaaagccc

SEQ ID NO: 1207 - RNA, 19 nt, Artificial Sequence
  Description of Artificial Sequence:  Target Sequence/siNA sense region
agcagaguucaaaagcccu

SEQ ID NO: 1208 - RNA, 19 nt, Artificial Sequence
  Description of Artificial Sequence:  Target Sequence/siNA sense region
gcagaguucaaaagcccuu

SEQ ID NO: 1209 - RNA, 19 nt, Artificial Sequence
  Description of Artificial Sequence:  Target Sequence/siNA sense region
cagaguucaaaagcccuuc

SEQ ID NO: 1210 - RNA, 19 nt, Artificial Sequence
  Description of Artificial Sequence:  Target Sequence/siNA sense region
agaguucaaaagcccuuca

SEQ ID NO: 1211 - RNA, 19 nt, Artificial Sequence
  Description of Artificial Sequence:  Target Sequence/siNA sense region
gaguucaaaagcccuucag

SEQ ID NO: 1212 - RNA, 19 nt, Artificial Sequence
  Description of Artificial Sequence:  Target Sequence/siNA sense region
aguucaaaagcccuucagc

SEQ ID NO: 1213 - RNA, 19 nt, Artificial Sequence
  Description of Artificial Sequence:  Target Sequence/siNA sense region
guucaaaagcccuucagcg

SEQ ID NO: 1214 - RNA, 19 nt, Artificial Sequence
  Description of Artificial Sequence:  Target Sequence/siNA sense region
uucaaaagcccuucagcgg

SEQ ID NO: 1215 - RNA, 19 nt, Artificial Sequence
  Description of Artificial Sequence:  Target Sequence/siNA sense region
ucaaaagcccuucagcggc

SEQ ID NO: 1216 - RNA, 19 nt, Artificial Sequence
  Description of Artificial Sequence:  Target Sequence/siNA sense region
caaaagcccuucagcggcc

SEQ ID NO: 1217 - RNA, 19 nt, Artificial Sequence
  Description of Artificial Sequence:  Target Sequence/siNA sense region
aaaagcccuucagcggcca

SEQ ID NO: 1218 - RNA, 19 nt, Artificial Sequence
  Description of Artificial Sequence:  Target Sequence/siNA sense region
aaagcccuucagcggccag

SEQ ID NO: 1219 - RNA, 19 nt, Artificial Sequence
  Description of Artificial Sequence:  siNA antisense region
uuugaacucugcuuaaauc

SEQ ID NO: 1220 - RNA, 19 nt, Artificial Sequence
  Description of Artificial Sequence:  siNA antisense region
uuuugaacucugcuuaaau

SEQ ID NO: 1221 - RNA, 19 nt, Artificial Sequence
  Description of Artificial Sequence:  siNA antisense region
cuuuugaacucugcuuaaa

SEQ ID NO: 1222 - RNA, 19 nt, Artificial Sequence
  Description of Artificial Sequence:  siNA antisense region
gcuuuugaacucugcuuaa

SEQ ID NO: 1223 - RNA, 19 nt, Artificial Sequence
  Description of Artificial Sequence:  siNA antisense region
ggcuuuugaacucugcuua

SEQ ID NO: 1224 - RNA, 19 nt, Artificial Sequence
  Description of Artificial Sequence:  siNA antisense region
gggcuuuugaacucugcuu

SEQ ID NO: 1225 - RNA, 19 nt, Artificial Sequence
  Description of Artificial Sequence:  siNA antisense region
agggcuuuugaacucugcu

SEQ ID NO: 1226 - RNA, 19 nt, Artificial Sequence
  Description of Artificial Sequence:  siNA antisense region
aagggcuuuugaacucugc

SEQ ID NO: 1227 - RNA, 19 nt, Artificial Sequence
  Description of Artificial Sequence:  siNA antisense region
gaagggcuuuugaacucug

SEQ ID NO: 1228 - RNA, 19 nt, Artificial Sequence
  Description of Artificial Sequence:  siNA antisense region
ugaagggcuuuugaacucu

SEQ ID NO: 1229 - RNA, 19 nt, Artificial Sequence
  Description of Artificial Sequence:  siNA antisense region
cugaagggcuuuugaacuc

SEQ ID NO: 1230 - RNA, 19 nt, Artificial Sequence
  Description of Artificial Sequence:  siNA antisense region
gcugaagggcuuuugaacu

SEQ ID NO: 1231 - RNA, 19 nt, Artificial Sequence
  Description of Artificial Sequence:  siNA antisense region
cgcugaagggcuuuugaac

SEQ ID NO: 1232 - RNA, 19 nt, Artificial Sequence
  Description of Artificial Sequence:  siNA antisense region
ccgcugaagggcuuuugaa

SEQ ID NO: 1233 - RNA, 19 nt, Artificial Sequence
  Description of Artificial Sequence:  siNA antisense region
gccgcugaagggcuuuuga

SEQ ID NO: 1234 - RNA, 19 nt, Artificial Sequence
  Description of Artificial Sequence:  siNA antisense region
ggccgcugaagggcuuuug

SEQ ID NO: 1235 - RNA, 19 nt, Artificial Sequence
  Description of Artificial Sequence:  siNA antisense region
uggccgcugaagggcuuuu

SEQ ID NO: 1236 - RNA, 19 nt, Artificial Sequence
  Description of Artificial Sequence:  siNA antisense region
cuggccgcugaagggcuuu

SEQ ID NO: 1237 - RNA, 19 nt, Artificial Sequence
  Description of Artificial Sequence:  Target Sequence/siNA sense region
guccgcgcguguccgcgcc

SEQ ID NO: 1238 - RNA, 19 nt, Artificial Sequence
  Description of Artificial Sequence:  Target Sequence/siNA sense region
ccgcgugugccagcgcgcg

SEQ ID NO: 1239 - RNA, 19 nt, Artificial Sequence
  Description of Artificial Sequence:  Target Sequence/siNA sense region
gugccuuggccgugcgcgc

SEQ ID NO: 1240 - RNA, 19 nt, Artificial Sequence
  Description of Artificial Sequence:  Target Sequence/siNA sense region
ccgagccgggucgcacuaa

SEQ ID NO: 1241 - RNA, 19 nt, Artificial Sequence
  Description of Artificial Sequence:  Target Sequence/siNA sense region
acucccucggcgccgacgg

SEQ ID NO: 1242 - RNA, 19 nt, Artificial Sequence
  Description of Artificial Sequence:  Target Sequence/siNA sense region
gcggcgcuaaccucucggu

SEQ ID NO: 1243 - RNA, 19 nt, Artificial Sequence
  Description of Artificial Sequence:  Target Sequence/siNA sense region
uuauuccaggaucuuugga

SEQ ID NO: 1244 - RNA, 19 nt, Artificial Sequence
  Description of Artificial Sequence:  Target Sequence/siNA sense region
agacccgaggaaagccgug

SEQ ID NO: 1245 - RNA, 19 nt, Artificial Sequence
  Description of Artificial Sequence:  Target Sequence/siNA sense region
guugaccaaaagcaagaca

SEQ ID NO: 1246 - RNA, 19 nt, Artificial Sequence
  Description of Artificial Sequence:  Target Sequence/siNA sense region
aaaugacucacagagaaaa

SEQ ID NO: 1247 - RNA, 19 nt, Artificial Sequence
  Description of Artificial Sequence:  Target Sequence/siNA sense region
aaagauggcagaaccaagg

SEQ ID NO: 1248 - RNA, 19 nt, Artificial Sequence
  Description of Artificial Sequence:  Target Sequence/siNA sense region
ggcaacuaaagccgucagg

SEQ ID NO: 1249 - RNA, 19 nt, Artificial Sequence
  Description of Artificial Sequence:  Target Sequence/siNA sense region
guucugaacagcugguaga

SEQ ID NO: 1250 - RNA, 19 nt, Artificial Sequence
  Description of Artificial Sequence:  Target Sequence/siNA sense region
augggcuggcuuacugaag

SEQ ID NO: 1251 - RNA, 19 nt, Artificial Sequence
  Description of Artificial Sequence:  Target Sequence/siNA sense region
ggacaugauucagacuguc

SEQ ID NO: 1252 - RNA, 19 nt, Artificial Sequence
  Description of Artificial Sequence:  Target Sequence/siNA sense region
cccggacccagcagcucau

SEQ ID NO: 1253 - RNA, 19 nt, Artificial Sequence
  Description of Artificial Sequence:  Target Sequence/siNA sense region
uaucaaggaagccuuauca

SEQ ID NO: 1254 - RNA, 19 nt, Artificial Sequence
  Description of Artificial Sequence:  Target Sequence/siNA sense region
aguugugagugaggaccag

SEQ ID NO: 1255 - RNA, 19 nt, Artificial Sequence
  Description of Artificial Sequence:  Target Sequence/siNA sense region
gucguuguuugagugugcc

SEQ ID NO: 1256 - RNA, 19 nt, Artificial Sequence
  Description of Artificial Sequence:  Target Sequence/siNA sense region
cuacggaacgccacaccug

SEQ ID NO: 1257 - RNA, 19 nt, Artificial Sequence
  Description of Artificial Sequence:  Target Sequence/siNA sense region
ggcuaagacagagaugacc

SEQ ID NO: 1258 - RNA, 19 nt, Artificial Sequence
  Description of Artificial Sequence:  Target Sequence/siNA sense region
cgcguccuccuccagcgac

SEQ ID NO: 1259 - RNA, 19 nt, Artificial Sequence
  Description of Artificial Sequence:  Target Sequence/siNA sense region
cuauggacagacuuccaag

SEQ ID NO: 1260 - RNA, 19 nt, Artificial Sequence
  Description of Artificial Sequence:  Target Sequence/siNA sense region
gaugagcccacgcgucccu

SEQ ID NO: 1261 - RNA, 19 nt, Artificial Sequence
  Description of Artificial Sequence:  Target Sequence/siNA sense region
ucagcaggauuggcugucu

SEQ ID NO: 1262 - RNA, 19 nt, Artificial Sequence
  Description of Artificial Sequence:  Target Sequence/siNA sense region
ucaacccccagccaggguc

SEQ ID NO: 1263 - RNA, 19 nt, Artificial Sequence
  Description of Artificial Sequence:  Target Sequence/siNA sense region
caccaucaaaauggaaugu

SEQ ID NO: 1264 - RNA, 19 nt, Artificial Sequence
  Description of Artificial Sequence:  Target Sequence/siNA sense region
uaacccuagccaggugaau

SEQ ID NO: 1265 - RNA, 19 nt, Artificial Sequence
  Description of Artificial Sequence:  Target Sequence/siNA sense region
uggcucaaggaacucuccu

SEQ ID NO: 1266 - RNA, 19 nt, Artificial Sequence
  Description of Artificial Sequence:  Target Sequence/siNA sense region
ugaugaaugcaguguggcc

SEQ ID NO: 1267 - RNA, 19 nt, Artificial Sequence
  Description of Artificial Sequence:  Target Sequence/siNA sense region
caaaggcgggaagauggug

SEQ ID NO: 1268 - RNA, 19 nt, Artificial Sequence
  Description of Artificial Sequence:  Target Sequence/siNA sense region
gggcagcccagacaccguu

SEQ ID NO: 1269 - RNA, 19 nt, Artificial Sequence
  Description of Artificial Sequence:  Target Sequence/siNA sense region
ugggaugaacuacggcagc

SEQ ID NO: 1270 - RNA, 19 nt, Artificial Sequence
  Description of Artificial Sequence:  Target Sequence/siNA sense region
cuacauggaggagaagcac

SEQ ID NO: 1271 - RNA, 19 nt, Artificial Sequence
  Description of Artificial Sequence:  Target Sequence/siNA sense region
caugccacccccaaacaug

SEQ ID NO: 1272 - RNA, 19 nt, Artificial Sequence
  Description of Artificial Sequence:  Target Sequence/siNA sense region
gaccacgaacgagcgcaga

SEQ ID NO: 1273 - RNA, 19 nt, Artificial Sequence
  Description of Artificial Sequence:  Target Sequence/siNA sense region
aguuaucgugccagcagau

SEQ ID NO: 1274 - RNA, 19 nt, Artificial Sequence
  Description of Artificial Sequence:  Target Sequence/siNA sense region
uccuacgcuauggaguaca

SEQ ID NO: 1275 - RNA, 19 nt, Artificial Sequence
  Description of Artificial Sequence:  Target Sequence/siNA sense region
agaccaugugcggcagugg

SEQ ID NO: 1276 - RNA, 19 nt, Artificial Sequence
  Description of Artificial Sequence:  Target Sequence/siNA sense region
gcuggagugggcggugaaa

SEQ ID NO: 1277 - RNA, 19 nt, Artificial Sequence
  Description of Artificial Sequence:  Target Sequence/siNA sense region
agaauauggccuuccagac

SEQ ID NO: 1278 - RNA, 19 nt, Artificial Sequence
  Description of Artificial Sequence:  Target Sequence/siNA sense region
cgucaacaucuuguuauuc

SEQ ID NO: 1279 - RNA, 19 nt, Artificial Sequence
  Description of Artificial Sequence:  Target Sequence/siNA sense region
ccagaacaucgaugggaag

SEQ ID NO: 1280 - RNA, 19 nt, Artificial Sequence
  Description of Artificial Sequence:  Target Sequence/siNA sense region
ggaacugugcaagaugacc

SEQ ID NO: 1281 - RNA, 19 nt, Artificial Sequence
  Description of Artificial Sequence:  Target Sequence/siNA sense region
caaggacgacuuccagagg

SEQ ID NO: 1282 - RNA, 19 nt, Artificial Sequence
  Description of Artificial Sequence:  Target Sequence/siNA sense region
gcucacccccagcuacaac

SEQ ID NO: 1283 - RNA, 19 nt, Artificial Sequence
  Description of Artificial Sequence:  Target Sequence/siNA sense region
cgccgacauccuucucuca

SEQ ID NO: 1284 - RNA, 19 nt, Artificial Sequence
  Description of Artificial Sequence:  Target Sequence/siNA sense region
acaucuccacuaccucaga

SEQ ID NO: 1285 - RNA, 19 nt, Artificial Sequence
  Description of Artificial Sequence:  Target Sequence/siNA sense region
agagacuccucuuccacau

SEQ ID NO: 1286 - RNA, 19 nt, Artificial Sequence
  Description of Artificial Sequence:  Target Sequence/siNA sense region
uuugacuucagaugauguu

SEQ ID NO: 1287 - RNA, 19 nt, Artificial Sequence
  Description of Artificial Sequence:  Target Sequence/siNA sense region
ugauaaagccuuacaaaac

SEQ ID NO: 1288 - RNA, 19 nt, Artificial Sequence
  Description of Artificial Sequence:  Target Sequence/siNA sense region
cucuccacgguuaaugcau

SEQ ID NO: 1289 - RNA, 19 nt, Artificial Sequence
  Description of Artificial Sequence:  Target Sequence/siNA sense region
ugcuagaaacacagauuua

SEQ ID NO: 1290 - RNA, 19 nt, Artificial Sequence
  Description of Artificial Sequence:  Target Sequence/siNA sense region
accauaugagccccccagg

SEQ ID NO: 1291 - RNA, 19 nt, Artificial Sequence
  Description of Artificial Sequence:  Target Sequence/siNA sense region
gagaucagccuggaccggu

SEQ ID NO: 1292 - RNA, 19 nt, Artificial Sequence
  Description of Artificial Sequence:  Target Sequence/siNA sense region
ucacggccaccccacgccc

SEQ ID NO: 1293 - RNA, 19 nt, Artificial Sequence
  Description of Artificial Sequence:  Target Sequence/siNA sense region
ccagucgaaagcugcucaa

SEQ ID NO: 1294 - RNA, 19 nt, Artificial Sequence
  Description of Artificial Sequence:  Target Sequence/siNA sense region
accaucuccuuccacagug

SEQ ID NO: 1295 - RNA, 19 nt, Artificial Sequence
  Description of Artificial Sequence:  Target Sequence/siNA sense region
gcccaaaacugaagaccag

SEQ ID NO: 1296 - RNA, 19 nt, Artificial Sequence
  Description of Artificial Sequence:  Target Sequence/siNA sense region
gcguccucaguuagauccu

SEQ ID NO: 1297 - RNA, 19 nt, Artificial Sequence
  Description of Artificial Sequence:  Target Sequence/siNA sense region
uuaucagauucuuggacca

SEQ ID NO: 1298 - RNA, 19 nt, Artificial Sequence
  Description of Artificial Sequence:  Target Sequence/siNA sense region
aacaaguagccgccuugca

SEQ ID NO: 1299 - RNA, 19 nt, Artificial Sequence
  Description of Artificial Sequence:  Target Sequence/siNA sense region
aaauccaggcaguggccag

SEQ ID NO: 1300 - RNA, 19 nt, Artificial Sequence
  Description of Artificial Sequence:  Target Sequence/siNA sense region
gauccagcuuuggcaguuc

SEQ ID NO: 1301 - RNA, 19 nt, Artificial Sequence
  Description of Artificial Sequence:  Target Sequence/siNA sense region
ccuccuggagcuccugucg

SEQ ID NO: 1302 - RNA, 19 nt, Artificial Sequence
  Description of Artificial Sequence:  Target Sequence/siNA sense region
ggacagcuccaacuccagc

SEQ ID NO: 1303 - RNA, 19 nt, Artificial Sequence
  Description of Artificial Sequence:  Target Sequence/siNA sense region
cugcaucaccugggaaggc

SEQ ID NO: 1304 - RNA, 19 nt, Artificial Sequence
  Description of Artificial Sequence:  Target Sequence/siNA sense region
caccaacggggaguucaag

SEQ ID NO: 1305 - RNA, 19 nt, Artificial Sequence
  Description of Artificial Sequence:  Target Sequence/siNA sense region
gaugacggaucccgacgag

SEQ ID NO: 1306 - RNA, 19 nt, Artificial Sequence
  Description of Artificial Sequence:  Target Sequence/siNA sense region
gguggcccggcgcugggga

SEQ ID NO: 1307 - RNA, 19 nt, Artificial Sequence
  Description of Artificial Sequence:  Target Sequence/siNA sense region
agagcggaagagcaaaccc

SEQ ID NO: 1308 - RNA, 19 nt, Artificial Sequence
  Description of Artificial Sequence:  Target Sequence/siNA sense region
caacaugaacuacgauaag

SEQ ID NO: 1309 - RNA, 19 nt, Artificial Sequence
  Description of Artificial Sequence:  Target Sequence/siNA sense region
gcucagccgcgcccuccgu

SEQ ID NO: 1310 - RNA, 19 nt, Artificial Sequence
  Description of Artificial Sequence:  Target Sequence/siNA sense region
uuacuacuaugacaagaac

SEQ ID NO: 1311 - RNA, 19 nt, Artificial Sequence
  Description of Artificial Sequence:  Target Sequence/siNA sense region
caucaugaccaagguccau

SEQ ID NO: 1312 - RNA, 19 nt, Artificial Sequence
  Description of Artificial Sequence:  Target Sequence/siNA sense region
ugggaagcgcuacgccuac

SEQ ID NO: 1313 - RNA, 19 nt, Artificial Sequence
  Description of Artificial Sequence:  Target Sequence/siNA sense region
caaguucgacuuccacggg

SEQ ID NO: 1314 - RNA, 19 nt, Artificial Sequence
  Description of Artificial Sequence:  Target Sequence/siNA sense region
gaucgcccaggcccuccag

SEQ ID NO: 1315 - RNA, 19 nt, Artificial Sequence
  Description of Artificial Sequence:  Target Sequence/siNA sense region
gccccaccccccggaguca

SEQ ID NO: 1316 - RNA, 19 nt, Artificial Sequence
  Description of Artificial Sequence:  Target Sequence/siNA sense region
aucucuguacaaguacccc

SEQ ID NO: 1317 - RNA, 19 nt, Artificial Sequence
  Description of Artificial Sequence:  Target Sequence/siNA sense region
cucagaccucccguacaug

SEQ ID NO: 1318 - RNA, 19 nt, Artificial Sequence
  Description of Artificial Sequence:  Target Sequence/siNA sense region
gggcuccuaucacgcccac

SEQ ID NO: 1319 - RNA, 19 nt, Artificial Sequence
  Description of Artificial Sequence:  Target Sequence/siNA sense region
cccacagaagaugaacuuu

SEQ ID NO: 1320 - RNA, 19 nt, Artificial Sequence
  Description of Artificial Sequence:  Target Sequence/siNA sense region
uguggcgccccacccucca

SEQ ID NO: 1321 - RNA, 19 nt, Artificial Sequence
  Description of Artificial Sequence:  Target Sequence/siNA sense region
agcccuccccgugacaucu

SEQ ID NO: 1322 - RNA, 19 nt, Artificial Sequence
  Description of Artificial Sequence:  Target Sequence/siNA sense region
uuccaguuuuuuugcugcc

SEQ ID NO: 1323 - RNA, 19 nt, Artificial Sequence
  Description of Artificial Sequence:  Target Sequence/siNA sense region
cccaaacccauacuggaau

SEQ ID NO: 1324 - RNA, 19 nt, Artificial Sequence
  Description of Artificial Sequence:  Target Sequence/siNA sense region
uucaccaacuggggguaua

SEQ ID NO: 1325 - RNA, 19 nt, Artificial Sequence
  Description of Artificial Sequence:  Target Sequence/siNA sense region
auaccccaacacuaggcuc

SEQ ID NO: 1326 - RNA, 19 nt, Artificial Sequence
  Description of Artificial Sequence:  Target Sequence/siNA sense region
ccccaccagccauaugccu

SEQ ID NO: 1327 - RNA, 19 nt, Artificial Sequence
  Description of Artificial Sequence:  Target Sequence/siNA sense region
uucucaucugggcacuuac

SEQ ID NO: 1328 - RNA, 19 nt, Artificial Sequence
  Description of Artificial Sequence:  Target Sequence/siNA sense region
cuacuaaagaccuggcgga

SEQ ID NO: 1329 - RNA, 19 nt, Artificial Sequence
  Description of Artificial Sequence:  Target Sequence/siNA sense region
aggcuuuucccaucagcgu

SEQ ID NO: 1330 - RNA, 19 nt, Artificial Sequence
  Description of Artificial Sequence:  Target Sequence/siNA sense region
ugcauucaccagcccaucg

SEQ ID NO: 1331 - RNA, 19 nt, Artificial Sequence
  Description of Artificial Sequence:  Target Sequence/siNA sense region
gccacaaacucuaucggag

SEQ ID NO: 1332 - RNA, 19 nt, Artificial Sequence
  Description of Artificial Sequence:  Target Sequence/siNA sense region
gaacaugaaucaaaagugc

SEQ ID NO: 1333 - RNA, 19 nt, Artificial Sequence
  Description of Artificial Sequence:  Target Sequence/siNA sense region
ccucaagaggaaugaaaaa

SEQ ID NO: 1334 - RNA, 19 nt, Artificial Sequence
  Description of Artificial Sequence:  Target Sequence/siNA sense region
aagcuuuacuggggcuggg

SEQ ID NO: 1335 - RNA, 19 nt, Artificial Sequence
  Description of Artificial Sequence:  Target Sequence/siNA sense region
ggaaggaagccggggaaga

SEQ ID NO: 1336 - RNA, 19 nt, Artificial Sequence
  Description of Artificial Sequence:  Target Sequence/siNA sense region
agauccaaagacucuuggg

SEQ ID NO: 1337 - RNA, 19 nt, Artificial Sequence
  Description of Artificial Sequence:  Target Sequence/siNA sense region
gagggaguuacugaagucu

SEQ ID NO: 1338 - RNA, 19 nt, Artificial Sequence
  Description of Artificial Sequence:  Target Sequence/siNA sense region
uuacuacagaaaugaggag

SEQ ID NO: 1339 - RNA, 19 nt, Artificial Sequence
  Description of Artificial Sequence:  Target Sequence/siNA sense region
ggaugcuaaaaaugucacg

SEQ ID NO: 1340 - RNA, 19 nt, Artificial Sequence
  Description of Artificial Sequence:  Target Sequence/siNA sense region
gaauauggacauaucaucu

SEQ ID NO: 1341 - RNA, 19 nt, Artificial Sequence
  Description of Artificial Sequence:  Target Sequence/siNA sense region
uguggacugaccuuguaaa

SEQ ID NO: 1342 - RNA, 19 nt, Artificial Sequence
  Description of Artificial Sequence:  Target Sequence/siNA sense region
aagacaguguauguagaag

SEQ ID NO: 1343 - RNA, 19 nt, Artificial Sequence
  Description of Artificial Sequence:  Target Sequence/siNA sense region
gcaugaagucuuaaggaca

SEQ ID NO: 1344 - RNA, 19 nt, Artificial Sequence
  Description of Artificial Sequence:  Target Sequence/siNA sense region
aaagugccaaagaaagugg

SEQ ID NO: 1345 - RNA, 19 nt, Artificial Sequence
  Description of Artificial Sequence:  Target Sequence/siNA sense region
gucuuaagaaauguauaaa

SEQ ID NO: 1346 - RNA, 19 nt, Artificial Sequence
  Description of Artificial Sequence:  Target Sequence/siNA sense region
acuuuagaguagaguuuga

SEQ ID NO: 1347 - RNA, 19 nt, Artificial Sequence
  Description of Artificial Sequence:  Target Sequence/siNA sense region
aaucccacuaaugcaaacu

SEQ ID NO: 1348 - RNA, 19 nt, Artificial Sequence
  Description of Artificial Sequence:  Target Sequence/siNA sense region
ugggaugaaacuaaagcaa

SEQ ID NO: 1349 - RNA, 19 nt, Artificial Sequence
  Description of Artificial Sequence:  Target Sequence/siNA sense region
auagaaacaacacaguuuu

SEQ ID NO: 1350 - RNA, 19 nt, Artificial Sequence
  Description of Artificial Sequence:  Target Sequence/siNA sense region
ugaccuaacauaccguuua

SEQ ID NO: 1351 - RNA, 19 nt, Artificial Sequence
  Description of Artificial Sequence:  Target Sequence/siNA sense region
auaaugccauuuuaaggaa

SEQ ID NO: 1352 - RNA, 19 nt, Artificial Sequence
  Description of Artificial Sequence:  Target Sequence/siNA sense region
aaacuaccuguauuuaaaa

SEQ ID NO: 1353 - RNA, 19 nt, Artificial Sequence
  Description of Artificial Sequence:  Target Sequence/siNA sense region
aauaguuucauaucaaaaa

SEQ ID NO: 1354 - RNA, 19 nt, Artificial Sequence
  Description of Artificial Sequence:  Target Sequence/siNA sense region
acaagagaaaagacacgag

SEQ ID NO: 1355 - RNA, 19 nt, Artificial Sequence
  Description of Artificial Sequence:  Target Sequence/siNA sense region
gagagacuguggcccauca

SEQ ID NO: 1356 - RNA, 19 nt, Artificial Sequence
  Description of Artificial Sequence:  Target Sequence/siNA sense region
aacagacguugauaugcaa

SEQ ID NO: 1357 - RNA, 19 nt, Artificial Sequence
  Description of Artificial Sequence:  Target Sequence/siNA sense region
acugcauggcaugugcugu

SEQ ID NO: 1358 - RNA, 19 nt, Artificial Sequence
  Description of Artificial Sequence:  Target Sequence/siNA sense region
uuuugguugaaaucaaaua

SEQ ID NO: 1359 - RNA, 19 nt, Artificial Sequence
  Description of Artificial Sequence:  Target Sequence/siNA sense region
acauuccguuugauggaca

SEQ ID NO: 1360 - RNA, 19 nt, Artificial Sequence
  Description of Artificial Sequence:  Target Sequence/siNA sense region
agcugucagcuuucucaaa

SEQ ID NO: 1361 - RNA, 19 nt, Artificial Sequence
  Description of Artificial Sequence:  Target Sequence/siNA sense region
acugugaagaugacccaaa

SEQ ID NO: 1362 - RNA, 19 nt, Artificial Sequence
  Description of Artificial Sequence:  Target Sequence/siNA sense region
aguuuccaacuccuuuaca

SEQ ID NO: 1363 - RNA, 19 nt, Artificial Sequence
  Description of Artificial Sequence:  Target Sequence/siNA sense region
aguauuaccgggacuauga

SEQ ID NO: 1364 - RNA, 19 nt, Artificial Sequence
  Description of Artificial Sequence:  Target Sequence/siNA sense region
aacuaaaaggugggacuga

SEQ ID NO: 1365 - RNA, 19 nt, Artificial Sequence
  Description of Artificial Sequence:  Target Sequence/siNA sense region
aggauguguauagagugag

SEQ ID NO: 1366 - RNA, 19 nt, Artificial Sequence
  Description of Artificial Sequence:  Target Sequence/siNA sense region
gcgugugauuguagacaga

SEQ ID NO: 1367 - RNA, 19 nt, Artificial Sequence
  Description of Artificial Sequence:  Target Sequence/siNA sense region
aggggugaagaaggaggag

SEQ ID NO: 1368 - RNA, 19 nt, Artificial Sequence
  Description of Artificial Sequence:  Target Sequence/siNA sense region
ggaagaggcagagaaggag

SEQ ID NO: 1369 - RNA, 19 nt, Artificial Sequence
  Description of Artificial Sequence:  Target Sequence/siNA sense region
ggagaccaggcugggaaag

SEQ ID NO: 1370 - RNA, 19 nt, Artificial Sequence
  Description of Artificial Sequence:  Target Sequence/siNA sense region
gaaacuucucaagcaauga

SEQ ID NO: 1371 - RNA, 19 nt, Artificial Sequence
  Description of Artificial Sequence:  Target Sequence/siNA sense region
aagacuggacucaggacau

SEQ ID NO: 1372 - RNA, 19 nt, Artificial Sequence
  Description of Artificial Sequence:  Target Sequence/siNA sense region
uuuggggacuguguacaau

SEQ ID NO: 1373 - RNA, 19 nt, Artificial Sequence
  Description of Artificial Sequence:  Target Sequence/siNA sense region
ugaguuauggagacucgag

SEQ ID NO: 1374 - RNA, 19 nt, Artificial Sequence
  Description of Artificial Sequence:  Target Sequence/siNA sense region
ggguucaugcagucagugu

SEQ ID NO: 1375 - RNA, 19 nt, Artificial Sequence
  Description of Artificial Sequence:  Target Sequence/siNA sense region
uuauaccaaacccaguguu

SEQ ID NO: 1376 - RNA, 19 nt, Artificial Sequence
  Description of Artificial Sequence:  Target Sequence/siNA sense region
uaggagaaaggacacagcg

SEQ ID NO: 1377 - RNA, 19 nt, Artificial Sequence
  Description of Artificial Sequence:  Target Sequence/siNA sense region
guaauggagaaagggaagu

SEQ ID NO: 1378 - RNA, 19 nt, Artificial Sequence
  Description of Artificial Sequence:  Target Sequence/siNA sense region
uaguagaauucagaaacaa

SEQ ID NO: 1379 - RNA, 19 nt, Artificial Sequence
  Description of Artificial Sequence:  Target Sequence/siNA sense region
aaaaugcgcaucucuuucu

SEQ ID NO: 1380 - RNA, 19 nt, Artificial Sequence
  Description of Artificial Sequence:  Target Sequence/siNA sense region
uuuguuugucaaaugaaaa

SEQ ID NO: 1381 - RNA, 19 nt, Artificial Sequence
  Description of Artificial Sequence:  Target Sequence/siNA sense region
auuuuaacuggaauugucu

SEQ ID NO: 1382 - RNA, 19 nt, Artificial Sequence
  Description of Artificial Sequence:  Target Sequence/siNA sense region
ugauauuuaagagaaacau

SEQ ID NO: 1383 - RNA, 19 nt, Artificial Sequence
  Description of Artificial Sequence:  Target Sequence/siNA sense region
uucaggaccucaucauuau

SEQ ID NO: 1384 - RNA, 19 nt, Artificial Sequence
  Description of Artificial Sequence:  Target Sequence/siNA sense region
ugugggggcuuuguucucc

SEQ ID NO: 1385 - RNA, 19 nt, Artificial Sequence
  Description of Artificial Sequence:  Target Sequence/siNA sense region
cacagggucagguaagaga

SEQ ID NO: 1386 - RNA, 19 nt, Artificial Sequence
  Description of Artificial Sequence:  Target Sequence/siNA sense region
auggccuucuuggcugcca

SEQ ID NO: 1387 - RNA, 19 nt, Artificial Sequence
  Description of Artificial Sequence:  Target Sequence/siNA sense region
acaaucagaaaucacgcag

SEQ ID NO: 1388 - RNA, 19 nt, Artificial Sequence
  Description of Artificial Sequence:  Target Sequence/siNA sense region
ggcauuuuggguaggcggc

SEQ ID NO: 1389 - RNA, 19 nt, Artificial Sequence
  Description of Artificial Sequence:  Target Sequence/siNA sense region
ccuccaguuuuccuuugag

SEQ ID NO: 1390 - RNA, 19 nt, Artificial Sequence
  Description of Artificial Sequence:  Target Sequence/siNA sense region
gucgcgaacgcugugcguu

SEQ ID NO: 1391 - RNA, 19 nt, Artificial Sequence
  Description of Artificial Sequence:  Target Sequence/siNA sense region
uugucagaaugaaguauac

SEQ ID NO: 1392 - RNA, 19 nt, Artificial Sequence
  Description of Artificial Sequence:  Target Sequence/siNA sense region
caagucaauguuuuucccc

SEQ ID NO: 1393 - RNA, 19 nt, Artificial Sequence
  Description of Artificial Sequence:  Target Sequence/siNA sense region
ccuuuuuauauaauaauua

SEQ ID NO: 1394 - RNA, 19 nt, Artificial Sequence
  Description of Artificial Sequence:  Target Sequence/siNA sense region
auauaacuuaugcauuuau

SEQ ID NO: 1395 - RNA, 19 nt, Artificial Sequence
  Description of Artificial Sequence:  Target Sequence/siNA sense region
uacacuacgaguugaucuc

SEQ ID NO: 1396 - RNA, 19 nt, Artificial Sequence
  Description of Artificial Sequence:  Target Sequence/siNA sense region
cggccagccaaagacacac

SEQ ID NO: 1397 - RNA, 19 nt, Artificial Sequence
  Description of Artificial Sequence:  Target Sequence/siNA sense region
cgacaaaagagacaaucga

SEQ ID NO: 1398 - RNA, 19 nt, Artificial Sequence
  Description of Artificial Sequence:  Target Sequence/siNA sense region
auauaauguggccuugaau

SEQ ID NO: 1399 - RNA, 19 nt, Artificial Sequence
  Description of Artificial Sequence:  Target Sequence/siNA sense region
uuuuaacucuguaugcuua

SEQ ID NO: 1400 - RNA, 19 nt, Artificial Sequence
  Description of Artificial Sequence:  Target Sequence/siNA sense region
aauguuuacaauaugaagu

SEQ ID NO: 1401 - RNA, 19 nt, Artificial Sequence
  Description of Artificial Sequence:  Target Sequence/siNA sense region
uuauuaguucuuagaaugc

SEQ ID NO: 1402 - RNA, 19 nt, Artificial Sequence
  Description of Artificial Sequence:  Target Sequence/siNA sense region
cagaauguauguaauaaaa

SEQ ID NO: 1403 - RNA, 19 nt, Artificial Sequence
  Description of Artificial Sequence:  Target Sequence/siNA sense region
auaagcuuggccuagcaug

SEQ ID NO: 1404 - RNA, 19 nt, Artificial Sequence
  Description of Artificial Sequence:  Target Sequence/siNA sense region
ggcaaaucagauuuauaca

SEQ ID NO: 1405 - RNA, 19 nt, Artificial Sequence
  Description of Artificial Sequence:  Target Sequence/siNA sense region
aggagucugcauuugcacu

SEQ ID NO: 1406 - RNA, 19 nt, Artificial Sequence
  Description of Artificial Sequence:  Target Sequence/siNA sense region
uuuuuuuagugacuaaagu

SEQ ID NO: 1407 - RNA, 19 nt, Artificial Sequence
  Description of Artificial Sequence:  Target Sequence/siNA sense region
uugcuuaaugaaaacaugu

SEQ ID NO: 1408 - RNA, 19 nt, Artificial Sequence
  Description of Artificial Sequence:  Target Sequence/siNA sense region
ugcugaauguuguggauuu

SEQ ID NO: 1409 - RNA, 19 nt, Artificial Sequence
  Description of Artificial Sequence:  Target Sequence/siNA sense region
uuguguuauaauuuacuuu

SEQ ID NO: 1410 - RNA, 19 nt, Artificial Sequence
  Description of Artificial Sequence:  Target Sequence/siNA sense region
uguccaggaacuugugcaa

SEQ ID NO: 1411 - RNA, 19 nt, Artificial Sequence
  Description of Artificial Sequence:  Target Sequence/siNA sense region
agggagagccaaggaaaua

SEQ ID NO: 1412 - RNA, 19 nt, Artificial Sequence
  Description of Artificial Sequence:  Target Sequence/siNA sense region
aauaggauguuuggcaccc

SEQ ID NO: 1413 - RNA, 19 nt, Artificial Sequence
  Description of Artificial Sequence:  siNA antisense region
ggcgcggacacgcgcggac

SEQ ID NO: 1414 - RNA, 19 nt, Artificial Sequence
  Description of Artificial Sequence:  siNA antisense region
cgcgcgcuggcacacgcgg

SEQ ID NO: 1415 - RNA, 19 nt, Artificial Sequence
  Description of Artificial Sequence:  siNA antisense region
gcgcgcacggccaaggcac

SEQ ID NO: 1416 - RNA, 19 nt, Artificial Sequence
  Description of Artificial Sequence:  siNA antisense region
uuagugcgacccggcucgg

SEQ ID NO: 1417 - RNA, 19 nt, Artificial Sequence
  Description of Artificial Sequence:  siNA antisense region
ccgucggcgccgagggagu

SEQ ID NO: 1418 - RNA, 19 nt, Artificial Sequence
  Description of Artificial Sequence:  siNA antisense region
accgagagguuagcgccgc

SEQ ID NO: 1419 - RNA, 19 nt, Artificial Sequence
  Description of Artificial Sequence:  siNA antisense region
uccaaagauccuggaauaa

SEQ ID NO: 1420 - RNA, 19 nt, Artificial Sequence
  Description of Artificial Sequence:  siNA antisense region
cacggcuuuccucgggucu

SEQ ID NO: 1421 - RNA, 19 nt, Artificial Sequence
  Description of Artificial Sequence:  siNA antisense region
ugucuugcuuuuggucaac

SEQ ID NO: 1422 - RNA, 19 nt, Artificial Sequence
  Description of Artificial Sequence:  siNA antisense region
uuuucucugugagucauuu

SEQ ID NO: 1423 - RNA, 19 nt, Artificial Sequence
  Description of Artificial Sequence:  siNA antisense region
ccuugguucugccaucuuu

SEQ ID NO: 1424 - RNA, 19 nt, Artificial Sequence
  Description of Artificial Sequence:  siNA antisense region
ccugacggcuuuaguugcc

SEQ ID NO: 1425 - RNA, 19 nt, Artificial Sequence
  Description of Artificial Sequence:  siNA antisense region
ucuaccagcuguucagaac

SEQ ID NO: 1426 - RNA, 19 nt, Artificial Sequence
  Description of Artificial Sequence:  siNA antisense region
cuucaguaagccagcccau

SEQ ID NO: 1427 - RNA, 19 nt, Artificial Sequence
  Description of Artificial Sequence:  siNA antisense region
gacagucugaaucaugucc

SEQ ID NO: 1428 - RNA, 19 nt, Artificial Sequence
  Description of Artificial Sequence:  siNA antisense region
augagcugcuggguccggg

SEQ ID NO: 1429 - RNA, 19 nt, Artificial Sequence
  Description of Artificial Sequence:  siNA antisense region
ugauaaggcuuccuugaua

SEQ ID NO: 1430 - RNA, 19 nt, Artificial Sequence
  Description of Artificial Sequence:  siNA antisense region
cugguccucacucacaacu

SEQ ID NO: 1431 - RNA, 19 nt, Artificial Sequence
  Description of Artificial Sequence:  siNA antisense region
ggcacacucaaacaacgac

SEQ ID NO: 1432 - RNA, 19 nt, Artificial Sequence
  Description of Artificial Sequence:  siNA antisense region
cagguguggcguuccguag

SEQ ID NO: 1433 - RNA, 19 nt, Artificial Sequence
  Description of Artificial Sequence:  siNA antisense region
ggucaucucugucuuagcc

SEQ ID NO: 1434 - RNA, 19 nt, Artificial Sequence
  Description of Artificial Sequence:  siNA antisense region
gucgcuggaggaggacgcg

SEQ ID NO: 1435 - RNA, 19 nt, Artificial Sequence
  Description of Artificial Sequence:  siNA antisense region
cuuggaagucuguccauag

SEQ ID NO: 1436 - RNA, 19 nt, Artificial Sequence
  Description of Artificial Sequence:  siNA antisense region
agggacgcgugggcucauc

SEQ ID NO: 1437 - RNA, 19 nt, Artificial Sequence
  Description of Artificial Sequence:  siNA antisense region
agacagccaauccugcuga

SEQ ID NO: 1438 - RNA, 19 nt, Artificial Sequence
  Description of Artificial Sequence:  siNA antisense region
gacccuggcuggggguuga

SEQ ID NO: 1439 - RNA, 19 nt, Artificial Sequence
  Description of Artificial Sequence:  siNA antisense region
acauuccauuuugauggug

SEQ ID NO: 1440 - RNA, 19 nt, Artificial Sequence
  Description of Artificial Sequence:  siNA antisense region
auucaccuggcuaggguua

SEQ ID NO: 1441 - RNA, 19 nt, Artificial Sequence
  Description of Artificial Sequence:  siNA antisense region
aggagaguuccuugagcca

SEQ ID NO: 1442 - RNA, 19 nt, Artificial Sequence
  Description of Artificial Sequence:  siNA antisense region
ggccacacugcauucauca

SEQ ID NO: 1443 - RNA, 19 nt, Artificial Sequence
  Description of Artificial Sequence:  siNA antisense region
caccaucuucccgccuuug

SEQ ID NO: 1444 - RNA, 19 nt, Artificial Sequence
  Description of Artificial Sequence:  siNA antisense region
aacggugucugggcugccc

SEQ ID NO: 1445 - RNA, 19 nt, Artificial Sequence
  Description of Artificial Sequence:  siNA antisense region
gcugccguaguucauccca

SEQ ID NO: 1446 - RNA, 19 nt, Artificial Sequence
  Description of Artificial Sequence:  siNA antisense region
gugcuucuccuccauguag

SEQ ID NO: 1447 - RNA, 19 nt, Artificial Sequence
  Description of Artificial Sequence:  siNA antisense region
cauguuuggggguggcaug

SEQ ID NO: 1448 - RNA, 19 nt, Artificial Sequence
  Description of Artificial Sequence:  siNA antisense region
ucugcgcucguucgugguc

SEQ ID NO: 1449 - RNA, 19 nt, Artificial Sequence
  Description of Artificial Sequence:  siNA antisense region
aucugcuggcacgauaacu

SEQ ID NO: 1450 - RNA, 19 nt, Artificial Sequence
  Description of Artificial Sequence:  siNA antisense region
uguacuccauagcguagga

SEQ ID NO: 1451 - RNA, 19 nt, Artificial Sequence
  Description of Artificial Sequence:  siNA antisense region
ccacugccgcacauggucu

SEQ ID NO: 1452 - RNA, 19 nt, Artificial Sequence
  Description of Artificial Sequence:  siNA antisense region
uuucaccgcccacuccagc

SEQ ID NO: 1453 - RNA, 19 nt, Artificial Sequence
  Description of Artificial Sequence:  siNA antisense region
gucuggaaggccauauucu

SEQ ID NO: 1454 - RNA, 19 nt, Artificial Sequence
  Description of Artificial Sequence:  siNA antisense region
gaauaacaagauguugacg

SEQ ID NO: 1455 - RNA, 19 nt, Artificial Sequence
  Description of Artificial Sequence:  siNA antisense region
cuucccaucgauguucugg

SEQ ID NO: 1456 - RNA, 19 nt, Artificial Sequence
  Description of Artificial Sequence:  siNA antisense region
ggucaucuugcacaguucc

SEQ ID NO: 1457 - RNA, 19 nt, Artificial Sequence
  Description of Artificial Sequence:  siNA antisense region
ccucuggaagucguccuug

SEQ ID NO: 1458 - RNA, 19 nt, Artificial Sequence
  Description of Artificial Sequence:  siNA antisense region
guuguagcugggggugagc

SEQ ID NO: 1459 - RNA, 19 nt, Artificial Sequence
  Description of Artificial Sequence:  siNA antisense region
ugagagaaggaugucggcg

SEQ ID NO: 1460 - RNA, 19 nt, Artificial Sequence
  Description of Artificial Sequence:  siNA antisense region
ucugagguaguggagaugu

SEQ ID NO: 1461 - RNA, 19 nt, Artificial Sequence
  Description of Artificial Sequence:  siNA antisense region
auguggaagaggagucucu

SEQ ID NO: 1462 - RNA, 19 nt, Artificial Sequence
  Description of Artificial Sequence:  siNA antisense region
aacaucaucugaagucaaa

SEQ ID NO: 1463 - RNA, 19 nt, Artificial Sequence
  Description of Artificial Sequence:  siNA antisense region
guuuuguaaggcuuuauca

SEQ ID NO: 1464 - RNA, 19 nt, Artificial Sequence
  Description of Artificial Sequence:  siNA antisense region
augcauuaaccguggagag

SEQ ID NO: 1465 - RNA, 19 nt, Artificial Sequence
  Description of Artificial Sequence:  siNA antisense region
uaaaucuguguuucuagca

SEQ ID NO: 1466 - RNA, 19 nt, Artificial Sequence
  Description of Artificial Sequence:  siNA antisense region
ccuggggggcucauauggu

SEQ ID NO: 1467 - RNA, 19 nt, Artificial Sequence
  Description of Artificial Sequence:  siNA antisense region
accgguccaggcugaucuc

SEQ ID NO: 1468 - RNA, 19 nt, Artificial Sequence
  Description of Artificial Sequence:  siNA antisense region
gggcgugggguggccguga

SEQ ID NO: 1469 - RNA, 19 nt, Artificial Sequence
  Description of Artificial Sequence:  siNA antisense region
uugagcagcuuucgacugg

SEQ ID NO: 1470 - RNA, 19 nt, Artificial Sequence
  Description of Artificial Sequence:  siNA antisense region
cacuguggaaggagauggu

SEQ ID NO: 1471 - RNA, 19 nt, Artificial Sequence
  Description of Artificial Sequence:  siNA antisense region
cuggucuucaguuuugggc

SEQ ID NO: 1472 - RNA, 19 nt, Artificial Sequence
  Description of Artificial Sequence:  siNA antisense region
aggaucuaacugaggacgc

SEQ ID NO: 1473 - RNA, 19 nt, Artificial Sequence
  Description of Artificial Sequence:  siNA antisense region
ugguccaagaaucugauaa

SEQ ID NO: 1474 - RNA, 19 nt, Artificial Sequence
  Description of Artificial Sequence:  siNA antisense region
ugcaaggcggcuacuuguu

SEQ ID NO: 1475 - RNA, 19 nt, Artificial Sequence
  Description of Artificial Sequence:  siNA antisense region
cuggccacugccuggauuu

SEQ ID NO: 1476 - RNA, 19 nt, Artificial Sequence
  Description of Artificial Sequence:  siNA antisense region
gaacugccaaagcuggauc

SEQ ID NO: 1477 - RNA, 19 nt, Artificial Sequence
  Description of Artificial Sequence:  siNA antisense region
cgacaggagcuccaggagg

SEQ ID NO: 1478 - RNA, 19 nt, Artificial Sequence
  Description of Artificial Sequence:  siNA antisense region
gcuggaguuggagcugucc

SEQ ID NO: 1479 - RNA, 19 nt, Artificial Sequence
  Description of Artificial Sequence:  siNA antisense region
gccuucccaggugaugcag

SEQ ID NO: 1480 - RNA, 19 nt, Artificial Sequence
  Description of Artificial Sequence:  siNA antisense region
cuugaacuccccguuggug

SEQ ID NO: 1481 - RNA, 19 nt, Artificial Sequence
  Description of Artificial Sequence:  siNA antisense region
cucgucgggauccgucauc

SEQ ID NO: 1482 - RNA, 19 nt, Artificial Sequence
  Description of Artificial Sequence:  siNA antisense region
uccccagcgccgggccacc

SEQ ID NO: 1483 - RNA, 19 nt, Artificial Sequence
  Description of Artificial Sequence:  siNA antisense region
ggguuugcucuuccgcucu

SEQ ID NO: 1484 - RNA, 19 nt, Artificial Sequence
  Description of Artificial Sequence:  siNA antisense region
cuuaucguaguucauguug

SEQ ID NO: 1485 - RNA, 19 nt, Artificial Sequence
  Description of Artificial Sequence:  siNA antisense region
acggagggcgcggcugagc

SEQ ID NO: 1486 - RNA, 19 nt, Artificial Sequence
  Description of Artificial Sequence:  siNA antisense region
guucuugucauaguaguaa

SEQ ID NO: 1487 - RNA, 19 nt, Artificial Sequence
  Description of Artificial Sequence:  siNA antisense region
auggaccuuggucaugaug

SEQ ID NO: 1488 - RNA, 19 nt, Artificial Sequence
  Description of Artificial Sequence:  siNA antisense region
guaggcguagcgcuuccca

SEQ ID NO: 1489 - RNA, 19 nt, Artificial Sequence
  Description of Artificial Sequence:  siNA antisense region
cccguggaagucgaacuug

SEQ ID NO: 1490 - RNA, 19 nt, Artificial Sequence
  Description of Artificial Sequence:  siNA antisense region
cuggagggccugggcgauc

SEQ ID NO: 1491 - RNA, 19 nt, Artificial Sequence
  Description of Artificial Sequence:  siNA antisense region
ugacuccgggggguggggc

SEQ ID NO: 1492 - RNA, 19 nt, Artificial Sequence
  Description of Artificial Sequence:  siNA antisense region
gggguacuuguacagagau

SEQ ID NO: 1493 - RNA, 19 nt, Artificial Sequence
  Description of Artificial Sequence:  siNA antisense region
cauguacgggaggucugag

SEQ ID NO: 1494 - RNA, 19 nt, Artificial Sequence
  Description of Artificial Sequence:  siNA antisense region
gugggcgugauaggagccc

SEQ ID NO: 1495 - RNA, 19 nt, Artificial Sequence
  Description of Artificial Sequence:  siNA antisense region
aaaguucaucuucuguggg

SEQ ID NO: 1496 - RNA, 19 nt, Artificial Sequence
  Description of Artificial Sequence:  siNA antisense region
uggaggguggggcgccaca

SEQ ID NO: 1497 - RNA, 19 nt, Artificial Sequence
  Description of Artificial Sequence:  siNA antisense region
agaugucacggggagggcu

SEQ ID NO: 1498 - RNA, 19 nt, Artificial Sequence
  Description of Artificial Sequence:  siNA antisense region
ggcagcaaaaaaacuggaa

SEQ ID NO: 1499 - RNA, 19 nt, Artificial Sequence
  Description of Artificial Sequence:  siNA antisense region
auuccaguauggguuuggg

SEQ ID NO: 1500 - RNA, 19 nt, Artificial Sequence
  Description of Artificial Sequence:  siNA antisense region
uauacccccaguuggugaa

SEQ ID NO: 1501 - RNA, 19 nt, Artificial Sequence
  Description of Artificial Sequence:  siNA antisense region
gagccuaguguugggguau

SEQ ID NO: 1502 - RNA, 19 nt, Artificial Sequence
  Description of Artificial Sequence:  siNA antisense region
aggcauauggcuggugggg

SEQ ID NO: 1503 - RNA, 19 nt, Artificial Sequence
  Description of Artificial Sequence:  siNA antisense region
guaagugcccagaugagaa

SEQ ID NO: 1504 - RNA, 19 nt, Artificial Sequence
  Description of Artificial Sequence:  siNA antisense region
uccgccaggucuuuaguag

SEQ ID NO: 1505 - RNA, 19 nt, Artificial Sequence
  Description of Artificial Sequence:  siNA antisense region
acgcugaugggaaaagccu

SEQ ID NO: 1506 - RNA, 19 nt, Artificial Sequence
  Description of Artificial Sequence:  siNA antisense region
cgaugggcuggugaaugca

SEQ ID NO: 1507 - RNA, 19 nt, Artificial Sequence
  Description of Artificial Sequence:  siNA antisense region
cuccgauagaguuuguggc

SEQ ID NO: 1508 - RNA, 19 nt, Artificial Sequence
  Description of Artificial Sequence:  siNA antisense region
gcacuuuugauucauguuc

SEQ ID NO: 1509 - RNA, 19 nt, Artificial Sequence
  Description of Artificial Sequence:  siNA antisense region
uuuuucauuccucuugagg

SEQ ID NO: 1510 - RNA, 19 nt, Artificial Sequence
  Description of Artificial Sequence:  siNA antisense region
cccagccccaguaaagcuu

SEQ ID NO: 1511 - RNA, 19 nt, Artificial Sequence
  Description of Artificial Sequence:  siNA antisense region
ucuuccccggcuuccuucc

SEQ ID NO: 1512 - RNA, 19 nt, Artificial Sequence
  Description of Artificial Sequence:  siNA antisense region
cccaagagucuuuggaucu

SEQ ID NO: 1513 - RNA, 19 nt, Artificial Sequence
  Description of Artificial Sequence:  siNA antisense region
agacuucaguaacucccuc

SEQ ID NO: 1514 - RNA, 19 nt, Artificial Sequence
  Description of Artificial Sequence:  siNA antisense region
cuccucauuucuguaguaa

SEQ ID NO: 1515 - RNA, 19 nt, Artificial Sequence
  Description of Artificial Sequence:  siNA antisense region
cgugacauuuuuagcaucc

SEQ ID NO: 1516 - RNA, 19 nt, Artificial Sequence
  Description of Artificial Sequence:  siNA antisense region
agaugauauguccauauuc

SEQ ID NO: 1517 - RNA, 19 nt, Artificial Sequence
  Description of Artificial Sequence:  siNA antisense region
uuuacaaggucaguccaca

SEQ ID NO: 1518 - RNA, 19 nt, Artificial Sequence
  Description of Artificial Sequence:  siNA antisense region
cuucuacauacacugucuu

SEQ ID NO: 1519 - RNA, 19 nt, Artificial Sequence
  Description of Artificial Sequence:  siNA antisense region
uguccuuaagacuucaugc

SEQ ID NO: 1520 - RNA, 19 nt, Artificial Sequence
  Description of Artificial Sequence:  siNA antisense region
ccacuuucuuuggcacuuu

SEQ ID NO: 1521 - RNA, 19 nt, Artificial Sequence
  Description of Artificial Sequence:  siNA antisense region
uuuauacauuucuuaagac

SEQ ID NO: 1522 - RNA, 19 nt, Artificial Sequence
  Description of Artificial Sequence:  siNA antisense region
ucaaacucuacucuaaagu

SEQ ID NO: 1523 - RNA, 19 nt, Artificial Sequence
  Description of Artificial Sequence:  siNA antisense region
aguuugcauuagugggauu

SEQ ID NO: 1524 - RNA, 19 nt, Artificial Sequence
  Description of Artificial Sequence:  siNA antisense region
uugcuuuaguuucauccca

SEQ ID NO: 1525 - RNA, 19 nt, Artificial Sequence
  Description of Artificial Sequence:  siNA antisense region
aaaacuguguuguuucuau

SEQ ID NO: 1526 - RNA, 19 nt, Artificial Sequence
  Description of Artificial Sequence:  siNA antisense region
uaaacgguauguuagguca

SEQ ID NO: 1527 - RNA, 19 nt, Artificial Sequence
  Description of Artificial Sequence:  siNA antisense region
uuccuuaaaauggcauuau

SEQ ID NO: 1528 - RNA, 19 nt, Artificial Sequence
  Description of Artificial Sequence:  siNA antisense region
uuuuaaauacagguaguuu

SEQ ID NO: 1529 - RNA, 19 nt, Artificial Sequence
  Description of Artificial Sequence:  siNA antisense region
uuuuugauaugaaacuauu

SEQ ID NO: 1530 - RNA, 19 nt, Artificial Sequence
  Description of Artificial Sequence:  siNA antisense region
cucgugucuuuucucuugu

SEQ ID NO: 1531 - RNA, 19 nt, Artificial Sequence
  Description of Artificial Sequence:  siNA antisense region
ugaugggccacagucucuc

SEQ ID NO: 1532 - RNA, 19 nt, Artificial Sequence
  Description of Artificial Sequence:  siNA antisense region
uugcauaucaacgucuguu

SEQ ID NO: 1533 - RNA, 19 nt, Artificial Sequence
  Description of Artificial Sequence:  siNA antisense region
acagcacaugccaugcagu

SEQ ID NO: 1534 - RNA, 19 nt, Artificial Sequence
  Description of Artificial Sequence:  siNA antisense region
uauuugauuucaaccaaaa

SEQ ID NO: 1535 - RNA, 19 nt, Artificial Sequence
  Description of Artificial Sequence:  siNA antisense region
uguccaucaaacggaaugu

SEQ ID NO: 1536 - RNA, 19 nt, Artificial Sequence
  Description of Artificial Sequence:  siNA antisense region
uuugagaaagcugacagcu

SEQ ID NO: 1537 - RNA, 19 nt, Artificial Sequence
  Description of Artificial Sequence:  siNA antisense region
uuugggucaucuucacagu

SEQ ID NO: 1538 - RNA, 19 nt, Artificial Sequence
  Description of Artificial Sequence:  siNA antisense region
uguaaaggaguuggaaacu

SEQ ID NO: 1539 - RNA, 19 nt, Artificial Sequence
  Description of Artificial Sequence:  siNA antisense region
ucauagucccgguaauacu

SEQ ID NO: 1540 - RNA, 19 nt, Artificial Sequence
  Description of Artificial Sequence:  siNA antisense region
ucagucccaccuuuuaguu

SEQ ID NO: 1541 - RNA, 19 nt, Artificial Sequence
  Description of Artificial Sequence:  siNA antisense region
cucacucuauacacauccu

SEQ ID NO: 1542 - RNA, 19 nt, Artificial Sequence
  Description of Artificial Sequence:  siNA antisense region
ucugucuacaaucacacgc

SEQ ID NO: 1543 - RNA, 19 nt, Artificial Sequence
  Description of Artificial Sequence:  siNA antisense region
cuccuccuucuucaccccu

SEQ ID NO: 1544 - RNA, 19 nt, Artificial Sequence
  Description of Artificial Sequence:  siNA antisense region
cuccuucucugccucuucc

SEQ ID NO: 1545 - RNA, 19 nt, Artificial Sequence
  Description of Artificial Sequence:  siNA antisense region
cuuucccagccuggucucc

SEQ ID NO: 1546 - RNA, 19 nt, Artificial Sequence
  Description of Artificial Sequence:  siNA antisense region
ucauugcuugagaaguuuc

SEQ ID NO: 1547 - RNA, 19 nt, Artificial Sequence
  Description of Artificial Sequence:  siNA antisense region
auguccugaguccagucuu

SEQ ID NO: 1548 - RNA, 19 nt, Artificial Sequence
  Description of Artificial Sequence:  siNA antisense region
auuguacacaguccccaaa

SEQ ID NO: 1549 - RNA, 19 nt, Artificial Sequence
  Description of Artificial Sequence:  siNA antisense region
cucgagucuccauaacuca

SEQ ID NO: 1550 - RNA, 19 nt, Artificial Sequence
  Description of Artificial Sequence:  siNA antisense region
acacugacugcaugaaccc

SEQ ID NO: 1551 - RNA, 19 nt, Artificial Sequence
  Description of Artificial Sequence:  siNA antisense region
aacacuggguuugguauaa

SEQ ID NO: 1552 - RNA, 19 nt, Artificial Sequence
  Description of Artificial Sequence:  siNA antisense region
cgcuguguccuuucuccua

SEQ ID NO: 1553 - RNA, 19 nt, Artificial Sequence
  Description of Artificial Sequence:  siNA antisense region
acuucccuuucuccauuac

SEQ ID NO: 1554 - RNA, 19 nt, Artificial Sequence
  Description of Artificial Sequence:  siNA antisense region
uuguuucugaauucuacua

SEQ ID NO: 1555 - RNA, 19 nt, Artificial Sequence
  Description of Artificial Sequence:  siNA antisense region
agaaagagaugcgcauuuu

SEQ ID NO: 1556 - RNA, 19 nt, Artificial Sequence
  Description of Artificial Sequence:  siNA antisense region
uuuucauuugacaaacaaa

SEQ ID NO: 1557 - RNA, 19 nt, Artificial Sequence
  Description of Artificial Sequence:  siNA antisense region
agacaauuccaguuaaaau

SEQ ID NO: 1558 - RNA, 19 nt, Artificial Sequence
  Description of Artificial Sequence:  siNA antisense region
auguuucucuuaaauauca

SEQ ID NO: 1559 - RNA, 19 nt, Artificial Sequence
  Description of Artificial Sequence:  siNA antisense region
auaaugaugagguccugaa

SEQ ID NO: 1560 - RNA, 19 nt, Artificial Sequence
  Description of Artificial Sequence:  siNA antisense region
ggagaacaaagcccccaca

SEQ ID NO: 1561 - RNA, 19 nt, Artificial Sequence
  Description of Artificial Sequence:  siNA antisense region
ucucuuaccugacccugug

SEQ ID NO: 1562 - RNA, 19 nt, Artificial Sequence
  Description of Artificial Sequence:  siNA antisense region
uggcagccaagaaggccau

SEQ ID NO: 1563 - RNA, 19 nt, Artificial Sequence
  Description of Artificial Sequence:  siNA antisense region
cugcgugauuucugauugu

SEQ ID NO: 1564 - RNA, 19 nt, Artificial Sequence
  Description of Artificial Sequence:  siNA antisense region
gccgccuacccaaaaugcc

SEQ ID NO: 1565 - RNA, 19 nt, Artificial Sequence
  Description of Artificial Sequence:  siNA antisense region
cucaaaggaaaacuggagg

SEQ ID NO: 1566 - RNA, 19 nt, Artificial Sequence
  Description of Artificial Sequence:  siNA antisense region
aacgcacagcguucgcgac

SEQ ID NO: 1567 - RNA, 19 nt, Artificial Sequence
  Description of Artificial Sequence:  siNA antisense region
guauacuucauucugacaa

SEQ ID NO: 1568 - RNA, 19 nt, Artificial Sequence
  Description of Artificial Sequence:  siNA antisense region
ggggaaaaacauugacuug

SEQ ID NO: 1569 - RNA, 19 nt, Artificial Sequence
  Description of Artificial Sequence:  siNA antisense region
uaauuauuauauaaaaagg

SEQ ID NO: 1570 - RNA, 19 nt, Artificial Sequence
  Description of Artificial Sequence:  siNA antisense region
auaaaugcauaaguuauau

SEQ ID NO: 1571 - RNA, 19 nt, Artificial Sequence
  Description of Artificial Sequence:  siNA antisense region
gagaucaacucguagugua

SEQ ID NO: 1572 - RNA, 19 nt, Artificial Sequence
  Description of Artificial Sequence:  siNA antisense region
gugugucuuuggcuggccg

SEQ ID NO: 1573 - RNA, 19 nt, Artificial Sequence
  Description of Artificial Sequence:  siNA antisense region
ucgauugucucuuuugucg

SEQ ID NO: 1574 - RNA, 19 nt, Artificial Sequence
  Description of Artificial Sequence:  siNA antisense region
auucaaggccacauuauau

SEQ ID NO: 1575 - RNA, 19 nt, Artificial Sequence
  Description of Artificial Sequence:  siNA antisense region
uaagcauacagaguuaaaa

SEQ ID NO: 1576 - RNA, 19 nt, Artificial Sequence
  Description of Artificial Sequence:  siNA antisense region
acuucauauuguaaacauu

SEQ ID NO: 1577 - RNA, 19 nt, Artificial Sequence
  Description of Artificial Sequence:  siNA antisense region
gcauucuaagaacuaauaa

SEQ ID NO: 1578 - RNA, 19 nt, Artificial Sequence
  Description of Artificial Sequence:  siNA antisense region
uuuuauuacauacauucug

SEQ ID NO: 1579 - RNA, 19 nt, Artificial Sequence
  Description of Artificial Sequence:  siNA antisense region
caugcuaggccaagcuuau

SEQ ID NO: 1580 - RNA, 19 nt, Artificial Sequence
  Description of Artificial Sequence:  siNA antisense region
uguauaaaucugauuugcc

SEQ ID NO: 1581 - RNA, 19 nt, Artificial Sequence
  Description of Artificial Sequence:  siNA antisense region
agugcaaaugcagacuccu

SEQ ID NO: 1582 - RNA, 19 nt, Artificial Sequence
  Description of Artificial Sequence:  siNA antisense region
acuuuagucacuaaaaaaa

SEQ ID NO: 1583 - RNA, 19 nt, Artificial Sequence
  Description of Artificial Sequence:  siNA antisense region
acauguuuucauuaagcaa

SEQ ID NO: 1584 - RNA, 19 nt, Artificial Sequence
  Description of Artificial Sequence:  siNA antisense region
aaauccacaacauucagca

SEQ ID NO: 1585 - RNA, 19 nt, Artificial Sequence
  Description of Artificial Sequence:  siNA antisense region
aaaguaaauuauaacacaa

SEQ ID NO: 1586 - RNA, 19 nt, Artificial Sequence
  Description of Artificial Sequence:  siNA antisense region
uugcacaaguuccuggaca

SEQ ID NO: 1587 - RNA, 19 nt, Artificial Sequence
  Description of Artificial Sequence:  siNA antisense region
uauuuccuuggcucucccu

SEQ ID NO: 1588 - RNA, 19 nt, Artificial Sequence
  Description of Artificial Sequence:  siNA antisense region
gggugccaaacauccuauu

SEQ ID NO: 1589 - RNA, 23 nt, Artificial Sequence
  Description of Artificial Sequence:  Target Sequence/siNA sense region
ugaccaucaauaaggaagaagcc

SEQ ID NO: 1590 - RNA, 23 nt, Artificial Sequence
  Description of Artificial Sequence:  Target Sequence/siNA sense region
ccaucaauaaggaagaagcccuu

SEQ ID NO: 1591 - RNA, 23 nt, Artificial Sequence
  Description of Artificial Sequence:  Target Sequence/siNA sense region
cugaccaucaauaaggaagaagc

SEQ ID NO: 1592 - RNA, 23 nt, Artificial Sequence
  Description of Artificial Sequence:  Target Sequence/siNA sense region
caauaaggaagaagcccuucagc

SEQ ID NO: 1593 - RNA, 23 nt, Artificial Sequence
  Description of Artificial Sequence:  Target Sequence/siNA sense region
uggauuuaagcagaguucaaaag

SEQ ID NO: 1594 - RNA, 23 nt, Artificial Sequence
  Description of Artificial Sequence:  Target Sequence/siNA sense region
gcagaguucaaaagcccuucagc

SEQ ID NO: 1595 - RNA, 23 nt, Artificial Sequence
  Description of Artificial Sequence:  Target Sequence/siNA sense region
agcagaguucaaaagcccuucag

SEQ ID NO: 1596 - RNA, 23 nt, Artificial Sequence
  Description of Artificial Sequence:  Target Sequence/siNA sense region
ggauuuaagcagaguucaaaagc

SEQ ID NO: 1597 - RNA, 23 nt, Artificial Sequence
  Description of Artificial Sequence:  Target Sequence/siNA sense region
aggugaauggcucaaggaacucu

SEQ ID NO: 1598 - RNA, 23 nt, Artificial Sequence
  Description of Artificial Sequence:  Target Sequence/siNA sense region
aaggaacugugcaagaugaccaa

SEQ ID NO: 1599 - RNA, 23 nt, Artificial Sequence
  Description of Artificial Sequence:  Target Sequence/siNA sense region
gaaagcugcucaaccaucuccuu

SEQ ID NO: 1600 - RNA, 23 nt, Artificial Sequence
  Description of Artificial Sequence:  Target Sequence/siNA sense region
cucaaccaucuccuuccacagug

SEQ ID NO: 1601 - RNA, 21 nt, Artificial Sequence
  Description of Artificial Sequence:  siNA sense region
  misc_feature (20)..(21): n stands for thymidine
accaucaauaaggaagaagnn

SEQ ID NO: 1602 - RNA, 21 nt, Artificial Sequence
  Description of Artificial Sequence:  siNA sense region
  misc_feature (20)..(21): n stands for thymidine
aucaauaaggaagaagcccnn

SEQ ID NO: 1603 - RNA, 21 nt, Artificial Sequence
  Description of Artificial Sequence:  siNA sense region
  misc_feature (20)..(21): n stands for thymidine
gaccaucaauaaggaagaann

SEQ ID NO: 1604 - RNA, 21 nt, Artificial Sequence
  Description of Artificial Sequence:  siNA sense region
  misc_feature (20)..(21): n stands for thymidine
auaaggaagaagcccuucann

SEQ ID NO: 1605 - RNA, 21 nt, Artificial Sequence
  Description of Artificial Sequence:  siNA antisense region
  misc_feature (20)..(21): n stands for thymidine
cuucuuccuuauugauggunn

SEQ ID NO: 1606 - RNA, 21 nt, Artificial Sequence
  Description of Artificial Sequence:  siNA antisense region
  misc_feature (20)..(21): n stands for thymidine
gggcuucuuccuuauugaunn

SEQ ID NO: 1607 - RNA, 21 nt, Artificial Sequence
  Description of Artificial Sequence:  siNA antisense region
  misc_feature (20)..(21): n stands for thymidine
uucuuccuuauugauggucnn

SEQ ID NO: 1608 - RNA, 21 nt, Artificial Sequence
  Description of Artificial Sequence:  siNA antisense region
  misc_feature (20)..(21): n stands for thymidine
ugaagggcuucuuccuuaunn

SEQ ID NO: 1609 - RNA, 21 nt, Artificial Sequence
  Description of Artificial Sequence:  siNA sense region
  misc_feature (1)..(1): 5'-3 attached terminal deoxyabasic moeity
  misc_feature (2)..(3): 2'-deoxy-2'-Fluoro
  misc_feature (5)..(6): 2'-deoxy-2'-Fluoro
  misc_feature (9)..(9): 2'-deoxy-2'-Fluoro
  misc_feature (20)..(20): n stands for thymidine
  misc_feature (21)..(21): 3'-3 attached terminal deoxyabasic moeity
accaucaauaaggaagaagnn

SEQ ID NO: 1610 - RNA, 21 nt, Artificial Sequence
  Description of Artificial Sequence:  siNA sense region
  misc_feature (1)..(1): 5'-3 attached terminal deoxyabasic moeity
  misc_feature (2)..(3): 2'-deoxy-2'-Fluoro
  misc_feature (6)..(6): 2'-deoxy-2'-Fluoro
  misc_feature (17)..(19): 2'-deoxy-2'-Fluoro
  misc_feature (20)..(20): n stands for thymidine
  misc_feature (21)..(21): 3'-3 attached terminal deoxyabasic moeity
aucaauaaggaagaagcccnn

SEQ ID NO: 1611 - RNA, 21 nt, Artificial Sequence
  Description of Artificial Sequence:  siNA sense region
  misc_feature (1)..(1): 5'-3 attached terminal deoxyabasic moeity
  misc_feature (3)..(4): 2'-deoxy-2'-Fluoro
  misc_feature (6)..(7): 2'-deoxy-2'-Fluoro
  misc_feature (10)..(10): 2'-deoxy-2'-Fluoro
  misc_feature (20)..(20): n stands for thymidine
  misc_feature (21)..(21): 3'-3 attached terminal deoxyabasic moeity
gaccaucaauaaggaagaann

SEQ ID NO: 1612 - RNA, 21 nt, Artificial Sequence
  Description of Artificial Sequence:  siNA sense region
  misc_feature (1)..(1): 5'-3 attached terminal deoxyabasic moeity
  misc_feature (2)..(2): 2'-deoxy-2'-Fluoro
  misc_feature (13)..(18): 2'-deoxy-2'-Fluoro
  misc_feature (20)..(20): n stands for thymidine
  misc_feature (21)..(21): 3'-3 attached terminal deoxyabasic moeity
auaaggaagaagcccuucann

SEQ ID NO: 1613 - RNA, 21 nt, Artificial Sequence
  Description of Artificial Sequence:  siNA antisense region
  misc_feature (1)..(10): 2'-deoxy-2'-Fluoro
  misc_feature (12)..(13): 2'-deoxy-2'-Fluoro
  misc_feature (16)..(16): 2'-deoxy-2'-Fluoro
  misc_feature (19)..(19): 2'-deoxy-2'-Fluoro
  misc_feature (20)..(20): Phosphorothioate 3'-Internucleotide Linkage
  misc_feature (21)..(21): n stands for thymidine
cuucuuccuuauugauggunn

SEQ ID NO: 1614 - RNA, 21 nt, Artificial Sequence
  Description of Artificial Sequence:  siNA antisense region
  misc_feature (4)..(13): 2'-deoxy-2'-Fluoro
  misc_feature (15)..(16): 2'-deoxy-2'-Fluoro
  misc_feature (19)..(19): 2'-deoxy-2'-Fluoro
  misc_feature (20)..(20): Phosphorothioate 3'-Internucleotide Linkage
  misc_feature (21)..(21): n stands for thymidine
gggcuucuuccuuauugaunn

SEQ ID NO: 1615 - RNA, 21 nt, Artificial Sequence
  Description of Artificial Sequence:  siNA antisense region
  misc_feature (1)..(9): 2'-deoxy-2'-Fluoro
  misc_feature (11)..(12): 2'-deoxy-2'-Fluoro
  misc_feature (15)..(15): 2'-deoxy-2'-Fluoro
  misc_feature (18)..(19): 2'-deoxy-2'-Fluoro
  misc_feature (20)..(20): Phosphorothioate 3'-Internucleotide Linkage
  misc_feature (21)..(21): n stands for thymidine
uucuuccuuauugauggucnn

SEQ ID NO: 1616 - RNA, 21 nt, Artificial Sequence
  Description of Artificial Sequence:  siNA antisense region
  misc_feature (1)..(1): 2'-deoxy-2'-Fluoro
  misc_feature (8)..(17): 2'-deoxy-2'-Fluoro
  misc_feature (19)..(19): 2'-deoxy-2'-Fluoro
  misc_feature (20)..(20): Phosphorothioate 3'-Internucleotide Linkage
  misc_feature (21)..(21): n stands for thymidine
ugaagggcuucuuccuuaunn

SEQ ID NO: 1617 - RNA, 21 nt, Artificial Sequence
  Description of Artificial Sequence:  siNA sense region
  misc_feature (1)..(1): 5'-3 attached terminal deoxyabasic moeity
  misc_feature (1)..(1): 2'-deoxy
  misc_feature (2)..(3): 2'-deoxy-2'-Fluoro
  misc_feature (4)..(4): 2'-deoxy
  misc_feature (5)..(6): 2'-deoxy-2'-Fluoro
  misc_feature (7)..(8): 2'-deoxy
  misc_feature (9)..(9): 2'-deoxy-2'-Fluoro
  misc_feature (10)..(19): 2'-deoxy
  misc_feature (20)..(20): n stands for thymidine
  misc_feature (21)..(21): 3'-3 attached terminal deoxyabasic moeity
accaucaauaaggaagaagnn

SEQ ID NO: 1618 - RNA, 21 nt, Artificial Sequence
  Description of Artificial Sequence:  siNA sense region
  misc_feature (1)..(1): 5'-3 attached terminal deoxyabasic moeity
  misc_feature (1)..(1): 2'-deoxy
  misc_feature (2)..(3): 2'-deoxy-2'-Fluoro
  misc_feature (4)..(5): 2'-deoxy
  misc_feature (6)..(6): 2'-deoxy-2'-Fluoro
  misc_feature (7)..(16): 2'-deoxy
  misc_feature (17)..(19): 2'-deoxy-2'-Fluoro
  misc_feature (20)..(20): n stands for thymidine
  misc_feature (21)..(21): 3'-3 attached terminal deoxyabasic moeity
aucaauaaggaagaagcccnn

SEQ ID NO: 1619 - RNA, 21 nt, Artificial Sequence
  Description of Artificial Sequence:  siNA sense region
  misc_feature (1)..(1): 5'-3 attached terminal deoxyabasic moeity
  misc_feature (1)..(2): 2'-deoxy
  misc_feature (3)..(4): 2'-deoxy-2'-Fluoro
  misc_feature (5)..(5): 2'-deoxy
  misc_feature (6)..(7): 2'-deoxy-2'-Fluoro
  misc_feature (8)..(9): 2'-deoxy
  misc_feature (10)..(10): 2'-deoxy-2'-Fluoro
  misc_feature (11)..(19): 2'-deoxy
  misc_feature (20)..(20): n stands for thymidine
  misc_feature (21)..(21): 3'-3 attached terminal deoxyabasic moeity
gaccaucaauaaggaagaann

SEQ ID NO: 1620 - RNA, 21 nt, Artificial Sequence
  Description of Artificial Sequence:  siNA sense region
  misc_feature (1)..(1): 5'-3 attached terminal deoxyabasic moeity
  misc_feature (1)..(1): 2'-deoxy
  misc_feature (2)..(2): 2'-deoxy-2'-Fluoro
  misc_feature (3)..(12): 2'-deoxy
  misc_feature (13)..(18): 2'-deoxy-2'-Fluoro
  misc_feature (19)..(19): 2'-deoxy
  misc_feature (20)..(20): n stands for thymidine
  misc_feature (21)..(21): 3'-3 attached terminal deoxyabasic moeity
auaaggaagaagcccuucann

SEQ ID NO: 1621 - RNA, 21 nt, Artificial Sequence
  Description of Artificial Sequence:  siNA antisense region
  misc_feature (1)..(10): 2'-deoxy-2'-Fluoro
  misc_feature (11)..(11): 2'-deoxy
  misc_feature (12)..(13): 2'-deoxy-2'-Fluoro
  misc_feature (14)..(15): 2'-deoxy
  misc_feature (16)..(16): 2'-deoxy-2'-Fluoro
  misc_feature (17)..(18): 2'-deoxy
  misc_feature (19)..(19): 2'-deoxy-2'-Fluoro
  misc_feature (20)..(20): Phosphorothioate 3'-Internucleotide Linkage
  misc_feature (21)..(21): n stands for thymidine
cuucuuccuuauugauggunn

SEQ ID NO: 1622 - RNA, 21 nt, Artificial Sequence
  Description of Artificial Sequence:  siNA antisense region
  misc_feature (1)..(3): 2'-deoxy
  misc_feature (4)..(13): 2'-deoxy-2'-Fluoro
  misc_feature (14)..(14): 2'-deoxy
  misc_feature (15)..(16): 2'-deoxy-2'-Fluoro
  misc_feature (17)..(18): 2'-deoxy
  misc_feature (19)..(19): 2'-deoxy-2'-Fluoro
  misc_feature (20)..(20): Phosphorothioate 3'-Internucleotide Linkage
  misc_feature (21)..(21): n stands for thymidine
gggcuucuuccuuauugaunn

SEQ ID NO: 1623 - RNA, 21 nt, Artificial Sequence
  Description of Artificial Sequence:  siNA antisense region
  misc_feature (1)..(9): 2'-deoxy-2'-Fluoro
  misc_feature (10)..(10): 2'-deoxy
  misc_feature (11)..(12): 2'-deoxy-2'-Fluoro
  misc_feature (13)..(14): 2'-deoxy
  misc_feature (15)..(15): 2'-deoxy-2'-Fluoro
  misc_feature (16)..(17): 2'-deoxy
  misc_feature (18)..(19): 2'-deoxy-2'-Fluoro
  misc_feature (20)..(20): Phosphorothioate 3'-Internucleotide Linkage
  misc_feature (21)..(21): n stands for thymidine
uucuuccuuauugauggucnn

SEQ ID NO: 1624 - RNA, 21 nt, Artificial Sequence
  Description of Artificial Sequence:  siNA antisense region
  misc_feature (1)..(1): 2'-deoxy-2'-Fluoro
  misc_feature (2)..(7): 2'-deoxy
  misc_feature (8)..(17): 2'-deoxy-2'-Fluoro
  misc_feature (18)..(18): 2'-deoxy
  misc_feature (19)..(19): 2'-deoxy-2'-Fluoro
  misc_feature (20)..(20): Phosphorothioate 3'-Internucleotide Linkage
  misc_feature (21)..(21): n stands for thymidine
ugaagggcuucuuccuuaunn

SEQ ID NO: 1625 - RNA, 21 nt, Artificial Sequence
  Description of Artificial Sequence:  siNA sense region
  misc_feature (20)..(21): n stands for thymidine
gauuuaagcagaguucaaann

SEQ ID NO: 1626 - RNA, 21 nt, Artificial Sequence
  Description of Artificial Sequence:  siNA sense region
  misc_feature (20)..(21): n stands for thymidine
agaguucaaaagcccuucann

SEQ ID NO: 1627 - RNA, 21 nt, Artificial Sequence
  Description of Artificial Sequence:  siNA sense region
  misc_feature (20)..(21): n stands for thymidine
cagaguucaaaagcccuucnn

SEQ ID NO: 1628 - RNA, 21 nt, Artificial Sequence
  Description of Artificial Sequence:  siNA sense region
  misc_feature (20)..(21): n stands for thymidine
auuuaagcagaguucaaaann

SEQ ID NO: 1629 - RNA, 21 nt, Artificial Sequence
  Description of Artificial Sequence:  siNA antisense region
  misc_feature (20)..(21): n stands for thymidine
uuugaacucugcuuaaaucnn

SEQ ID NO: 1630 - RNA, 21 nt, Artificial Sequence
  Description of Artificial Sequence:  siNA antisense region
  misc_feature (20)..(21): n stands for thymidine
ugaagggcuuuugaacucunn

SEQ ID NO: 1631 - RNA, 21 nt, Artificial Sequence
  Description of Artificial Sequence:  siNA antisense region
  misc_feature (20)..(21): n stands for thymidine
gaagggcuuuugaacucugnn

SEQ ID NO: 1632 - RNA, 21 nt, Artificial Sequence
  Description of Artificial Sequence:  siNA antisense region
  misc_feature (20)..(21): n stands for thymidine
uuuugaacucugcuuaaaunn

SEQ ID NO: 1633 - RNA, 21 nt, Artificial Sequence
  Description of Artificial Sequence:  siNA sense region
  misc_feature (1)..(1): 5'-3 attached terminal deoxyabasic moeity
  misc_feature (3)..(5): 2'-deoxy-2'-Fluoro
  misc_feature (9)..(9): 2'-deoxy-2'-Fluoro
  misc_feature (14)..(16): 2'-deoxy-2'-Fluoro
  misc_feature (20)..(20): n stands for thymidine
  misc_feature (21)..(21): 3'-3 attached terminal deoxyabasic moeity
gauuuaagcagaguucaaann

SEQ ID NO: 1634 - RNA, 21 nt, Artificial Sequence
  Description of Artificial Sequence:  siNA sense region
  misc_feature (1)..(1): 5'-3 attached terminal deoxyabasic moeity
  misc_feature (5)..(7): 2'-deoxy-2'-Fluoro
  misc_feature (13)..(18): 2'-deoxy-2'-Fluoro
  misc_feature (20)..(20): n stands for thymidine
  misc_feature (21)..(21): 3'-3 attached terminal deoxyabasic moeity
agaguucaaaagcccuucann

SEQ ID NO: 1635 - RNA, 21 nt, Artificial Sequence
  Description of Artificial Sequence:  siNA sense region
  misc_feature (1)..(1): 5'-3 attached terminal deoxyabasic moeity
  misc_feature (1)..(1): 2'-deoxy-2'-Fluoro
  misc_feature (6)..(8): 2'-deoxy-2'-Fluoro
  misc_feature (14)..(19): 2'-deoxy-2'-Fluoro
  misc_feature (20)..(20): n stands for thymidine
  misc_feature (21)..(21): 3'-3 attached terminal deoxyabasic moeity
cagaguucaaaagcccuucnn

SEQ ID NO: 1636 - RNA, 21 nt, Artificial Sequence
  Description of Artificial Sequence:  siNA sense region
  misc_feature (1)..(1): 5'-3 attached terminal deoxyabasic moeity
  misc_feature (2)..(4): 2'-deoxy-2'-Fluoro
  misc_feature (8)..(8): 2'-deoxy-2'-Fluoro
  misc_feature (13)..(15): 2'-deoxy-2'-Fluoro
  misc_feature (20)..(20): n stands for thymidine
  misc_feature (21)..(21): 3'-3 attached terminal deoxyabasic moeity
auuuaagcagaguucaaaann

SEQ ID NO: 1637 - RNA, 21 nt, Artificial Sequence
  Description of Artificial Sequence:  siNA antisense region
  misc_feature (1)..(3): 2'-deoxy-2'-Fluoro
  misc_feature (7)..(10): 2'-deoxy-2'-Fluoro
  misc_feature (12)..(14): 2'-deoxy-2'-Fluoro
  misc_feature (18)..(19): 2'-deoxy-2'-Fluoro
  misc_feature (20)..(20): Phosphorothioate 3'-Internucleotide Linkage
  misc_feature (21)..(21): n stands for thymidine
uuugaacucugcuuaaaucnn

SEQ ID NO: 1638 - RNA, 21 nt, Artificial Sequence
  Description of Artificial Sequence:  siNA antisense region
  misc_feature (1)..(1): 2'-deoxy-2'-Fluoro
  misc_feature (8)..(12): 2'-deoxy-2'-Fluoro
  misc_feature (16)..(19): 2'-deoxy-2'-Fluoro
  misc_feature (20)..(20): Phosphorothioate 3'-Internucleotide Linkage
  misc_feature (21)..(21): n stands for thymidine
ugaagggcuuuugaacucunn

SEQ ID NO: 1639 - RNA, 21 nt, Artificial Sequence
  Description of Artificial Sequence:  siNA antisense region
  misc_feature (7)..(11): 2'-deoxy-2'-Fluoro
  misc_feature (15)..(18): 2'-deoxy-2'-Fluoro
  misc_feature (20)..(20): Phosphorothioate 3'-Internucleotide Linkage
  misc_feature (21)..(21): n stands for thymidine
gaagggcuuuugaacucugnn

SEQ ID NO: 1640 - RNA, 21 nt, Artificial Sequence
  Description of Artificial Sequence:  siNA antisense region
  misc_feature (1)..(4): 2'-deoxy-2'-Fluoro
  misc_feature (8)..(11): 2'-deoxy-2'-Fluoro
  misc_feature (13)..(15): 2'-deoxy-2'-Fluoro
  misc_feature (19)..(19): 2'-deoxy-2'-Fluoro
  misc_feature (20)..(20): Phosphorothioate 3'-Internucleotide Linkage
  misc_feature (21)..(21): n stands for thymidine
uuuugaacucugcuuaaaunn

SEQ ID NO: 1641 - RNA, 21 nt, Artificial Sequence
  Description of Artificial Sequence:  siNA sense region
  misc_feature (1)..(1): 5'-3 attached terminal deoxyabasic moeity
  misc_feature (1)..(2): 2'-deoxy
  misc_feature (3)..(5): 2'-deoxy-2'-Fluoro
  misc_feature (6)..(8): 2'-deoxy
  misc_feature (9)..(9): 2'-deoxy-2'-Fluoro
  misc_feature (10)..(13): 2'-deoxy
  misc_feature (14)..(16): 2'-deoxy-2'-Fluoro
  misc_feature (17)..(19): 2'-deoxy
  misc_feature (20)..(20): n stands for thymidine
  misc_feature (21)..(21): 3'-3 attached terminal deoxyabasic moeity
gauuuaagcagaguucaaann

SEQ ID NO: 1642 - RNA, 21 nt, Artificial Sequence
  Description of Artificial Sequence:  siNA sense region
  misc_feature (1)..(1): 5'-3 attached terminal deoxyabasic moeity
  misc_feature (1)..(4): 2'-deoxy
  misc_feature (5)..(7): 2'-deoxy-2'-Fluoro
  misc_feature (8)..(12): 2'-deoxy
  misc_feature (13)..(18): 2'-deoxy-2'-Fluoro
  misc_feature (19)..(19): 2'-deoxy
  misc_feature (20)..(20): n stands for thymidine
  misc_feature (21)..(21): 3'-3 attached terminal deoxyabasic moeity
agaguucaaaagcccuucann

SEQ ID NO: 1643 - RNA, 21 nt, Artificial Sequence
  Description of Artificial Sequence:  siNA sense region
  misc_feature (1)..(1): 5'-3 attached terminal deoxyabasic moeity
  misc_feature (1)..(1): 2'-deoxy-2'-Fluoro
  misc_feature (2)..(5): 2'-deoxy
  misc_feature (6)..(8): 2'-deoxy-2'-Fluoro
  misc_feature (9)..(13): 2'-deoxy
  misc_feature (14)..(19): 2'-deoxy-2'-Fluoro
  misc_feature (20)..(20): n stands for thymidine
  misc_feature (21)..(21): 3'-3 attached terminal deoxyabasic moeity
cagaguucaaaagcccuucnn

SEQ ID NO: 1644 - RNA, 21 nt, Artificial Sequence
  Description of Artificial Sequence:  siNA sense region
  misc_feature (1)..(1): 5'-3 attached terminal deoxyabasic moeity
  misc_feature (1)..(1): 2'-deoxy
  misc_feature (2)..(4): 2'-deoxy-2'-Fluoro
  misc_feature (5)..(7): 2'-deoxy
  misc_feature (8)..(8): 2'-deoxy-2'-Fluoro
  misc_feature (9)..(12): 2'-deoxy
  misc_feature (13)..(15): 2'-deoxy-2'-Fluoro
  misc_feature (16)..(19): 2'-deoxy
  misc_feature (20)..(20): n stands for thymidine
  misc_feature (21)..(21): 3'-3 attached terminal deoxyabasic moeity
auuuaagcagaguucaaaann

SEQ ID NO: 1645 - RNA, 21 nt, Artificial Sequence
  Description of Artificial Sequence:  siNA antisense region
  misc_feature (1)..(3): 2'-deoxy-2'-Fluoro
  misc_feature (4)..(6): 2'-deoxy
  misc_feature (7)..(10): 2'-deoxy-2'-Fluoro
  misc_feature (11)..(11): 2'-deoxy
  misc_feature (12)..(14): 2'-deoxy-2'-Fluoro
  misc_feature (15)..(17): 2'-deoxy
  misc_feature (18)..(19): 2'-deoxy-2'-Fluoro
  misc_feature (20)..(20): Phosphorothioate 3'-Internucleotide Linkage
  misc_feature (21)..(21): n stands for thymidine
uuugaacucugcuuaaaucnn

SEQ ID NO: 1646 - RNA, 21 nt, Artificial Sequence
  Description of Artificial Sequence:  siNA antisense region
  misc_feature (1)..(1): 2'-deoxy-2'-Fluoro
  misc_feature (2)..(7): 2'-deoxy
  misc_feature (8)..(12): 2'-deoxy-2'-Fluoro
  misc_feature (13)..(15): 2'-deoxy
  misc_feature (16)..(19): 2'-deoxy-2'-Fluoro
  misc_feature (20)..(20): Phosphorothioate 3'-Internucleotide Linkage
  misc_feature (21)..(21): n stands for thymidine
ugaagggcuuuugaacucunn

SEQ ID NO: 1647 - RNA, 21 nt, Artificial Sequence
  Description of Artificial Sequence:  siNA antisense region
  misc_feature (1)..(6): 2'-deoxy
  misc_feature (7)..(11): 2'-deoxy-2'-Fluoro
  misc_feature (12)..(14): 2'-deoxy
  misc_feature (15)..(18): 2'-deoxy-2'-Fluoro
  misc_feature (19)..(19): 2'-deoxy
  misc_feature (20)..(20): Phosphorothioate 3'-Internucleotide Linkage
  misc_feature (21)..(21): n stands for thymidine
gaagggcuuuugaacucugnn

SEQ ID NO: 1648 - RNA, 21 nt, Artificial Sequence
  Description of Artificial Sequence:  siNA antisense region
  misc_feature (1)..(4): 2'-deoxy-2'-Fluoro
  misc_feature (5)..(7): 2'-deoxy
  misc_feature (8)..(11): 2'-deoxy-2'-Fluoro
  misc_feature (12)..(12): 2'-deoxy
  misc_feature (13)..(15): 2'-deoxy-2'-Fluoro
  misc_feature (16)..(18): 2'-deoxy
  misc_feature (19)..(19): 2'-deoxy-2'-Fluoro
  misc_feature (20)..(20): Phosphorothioate 3'-Internucleotide Linkage
  misc_feature (21)..(21): n stands for thymidine
uuuugaacucugcuuaaaunn

SEQ ID NO: 1649 - RNA, 21 nt, Artificial Sequence
  Description of Artificial Sequence:  siNA sense region
  misc_feature (20)..(21): n stands for thymidine
gugaauggcucaaggaacunn

SEQ ID NO: 1650 - RNA, 21 nt, Artificial Sequence
  Description of Artificial Sequence:  siNA sense region
  misc_feature (20)..(21): n stands for thymidine
ggaacugugcaagaugaccnn

SEQ ID NO: 1651 - RNA, 21 nt, Artificial Sequence
  Description of Artificial Sequence:  siNA sense region
  misc_feature (20)..(21): n stands for thymidine
aagcugcucaaccaucuccnn

SEQ ID NO: 1652 - RNA, 21 nt, Artificial Sequence
  Description of Artificial Sequence:  siNA sense region
  misc_feature (20)..(21): n stands for thymidine
caaccaucuccuuccacagnn

SEQ ID NO: 1653 - RNA, 21 nt, Artificial Sequence
  Description of Artificial Sequence:  siNA antisense region
  misc_feature (20)..(21): n stands for thymidine
aguuccuugagccauucacnn

SEQ ID NO: 1654 - RNA, 21 nt, Artificial Sequence
  Description of Artificial Sequence:  siNA antisense region
  misc_feature (20)..(21): n stands for thymidine
ggucaucuugcacaguuccnn

SEQ ID NO: 1655 - RNA, 21 nt, Artificial Sequence
  Description of Artificial Sequence:  siNA antisense region
  misc_feature (20)..(21): n stands for thymidine
ggagaugguugagcagcuunn

SEQ ID NO: 1656 - RNA, 21 nt, Artificial Sequence
  Description of Artificial Sequence:  siNA antisense region
  misc_feature (20)..(21): n stands for thymidine
cuguggaaggagaugguugnn

SEQ ID NO: 1657 - RNA, 21 nt, Artificial Sequence
  Description of Artificial Sequence:  siNA sense region
  misc_feature (1)..(1): 5'-3 attached terminal deoxyabasic moeity
  misc_feature (2)..(2): 2'-deoxy-2'-Fluoro
  misc_feature (6)..(6): 2'-deoxy-2'-Fluoro
  misc_feature (9)..(11): 2'-deoxy-2'-Fluoro
  misc_feature (18)..(19): 2'-deoxy-2'-Fluoro
  misc_feature (20)..(20): n stands for thymidine
  misc_feature (21)..(21): 3'-3 attached terminal deoxyabasic moeity
gugaauggcucaaggaacunn

SEQ ID NO: 1658 - RNA, 21 nt, Artificial Sequence
  Description of Artificial Sequence:  siNA sense region
  misc_feature (1)..(1): 5'-3 attached terminal deoxyabasic moeity
  misc_feature (5)..(6): 2'-deoxy-2'-Fluoro
  misc_feature (8)..(8): 2'-deoxy-2'-Fluoro
  misc_feature (10)..(10): 2'-deoxy-2'-Fluoro
  misc_feature (15)..(15): 2'-deoxy-2'-Fluoro
  misc_feature (18)..(19): 2'-deoxy-2'-Fluoro
  misc_feature (20)..(20): n stands for thymidine
  misc_feature (21)..(21): 3'-3 attached terminal deoxyabasic moeity
ggaacugugcaagaugaccnn

SEQ ID NO: 1659 - RNA, 21 nt, Artificial Sequence
  Description of Artificial Sequence:  siNA sense region
  misc_feature (1)..(1): 5'-3 attached terminal deoxyabasic moeity
  misc_feature (4)..(5): 2'-deoxy-2'-Fluoro
  misc_feature (7)..(9): 2'-deoxy-2'-Fluoro
  misc_feature (12)..(13): 2'-deoxy-2'-Fluoro
  misc_feature (15)..(19): 2'-deoxy-2'-Fluoro
  misc_feature (20)..(20): n stands for thymidine
  misc_feature (21)..(21): 3'-3 attached terminal deoxyabasic moeity
aagcugcucaaccaucuccnn

SEQ ID NO: 1660 - RNA, 21 nt, Artificial Sequence
  Description of Artificial Sequence:  siNA sense region
  misc_feature (1)..(1): 5'-3 attached terminal deoxyabasic moeity
  misc_feature (1)..(1): 2'-deoxy-2'-Fluoro
  misc_feature (4)..(5): 2'-deoxy-2'-Fluoro
  misc_feature (7)..(15): 2'-deoxy-2'-Fluoro
  misc_feature (17)..(17): 2'-deoxy-2'-Fluoro
  misc_feature (20)..(20): n stands for thymidine
  misc_feature (21)..(21): 3'-3 attached terminal deoxyabasic moeity
caaccaucuccuuccacagnn

SEQ ID NO: 1661 - RNA, 21 nt, Artificial Sequence
  Description of Artificial Sequence:  siNA antisense region
  misc_feature (3)..(8): 2'-deoxy-2'-Fluoro
  misc_feature (12)..(13): 2'-deoxy-2'-Fluoro
  misc_feature (15)..(17): 2'-deoxy-2'-Fluoro
  misc_feature (19)..(19): 2'-deoxy-2'-Fluoro
  misc_feature (20)..(20): Phosphorothioate 3'-Internucleotide Linkage
  misc_feature (21)..(21): n stands for thymidine
aguuccuugagccauucacnn

SEQ ID NO: 1662 - RNA, 21 nt, Artificial Sequence
  Description of Artificial Sequence:  siNA antisense region
  misc_feature (3)..(4): 2'-deoxy-2'-Fluoro
  misc_feature (6)..(9): 2'-deoxy-2'-Fluoro
  misc_feature (11)..(11): 2'-deoxy-2'-Fluoro
  misc_feature (13)..(13): 2'-deoxy-2'-Fluoro
  misc_feature (16)..(19): 2'-deoxy-2'-Fluoro
  misc_feature (20)..(20): Phosphorothioate 3'-Internucleotide Linkage
  misc_feature (21)..(21): n stands for thymidine
ggucaucuugcacaguuccnn

SEQ ID NO: 1663 - RNA, 21 nt, Artificial Sequence
  Description of Artificial Sequence:  siNA antisense region
  misc_feature (6)..(6): 2'-deoxy-2'-Fluoro
  misc_feature (9)..(10): 2'-deoxy-2'-Fluoro
  misc_feature (14)..(14): 2'-deoxy-2'-Fluoro
  misc_feature (17)..(19): 2'-deoxy-2'-Fluoro
  misc_feature (20)..(20): Phosphorothioate 3'-Internucleotide Linkage
  misc_feature (21)..(21): n stands for thymidine
ggagaugguugagcagcuunn

SEQ ID NO: 1664 - RNA, 21 nt, Artificial Sequence
  Description of Artificial Sequence:  siNA antisense region
  misc_feature (1)..(2): 2'-deoxy-2'-Fluoro
  misc_feature (4)..(4): 2'-deoxy-2'-Fluoro
  misc_feature (14)..(14): 2'-deoxy-2'-Fluoro
  misc_feature (17)..(18): 2'-deoxy-2'-Fluoro
  misc_feature (20)..(20): Phosphorothioate 3'-Internucleotide Linkage
  misc_feature (21)..(21): n stands for thymidine
cuguggaaggagaugguugnn

SEQ ID NO: 1665 - RNA, 21 nt, Artificial Sequence
  Description of Artificial Sequence:  siNA sense region
  misc_feature (1)..(1): 5'-3 attached terminal deoxyabasic moeity
  misc_feature (1)..(1): 2'-deoxy
  misc_feature (2)..(2): 2'-deoxy-2'-Fluoro
  misc_feature (3)..(5): 2'-deoxy
  misc_feature (6)..(6): 2'-deoxy-2'-Fluoro
  misc_feature (7)..(8): 2'-deoxy
  misc_feature (9)..(11): 2'-deoxy-2'-Fluoro
  misc_feature (12)..(17): 2'-deoxy
  misc_feature (18)..(19): 2'-deoxy-2'-Fluoro
  misc_feature (20)..(20): n stands for thymidine
  misc_feature (21)..(21): 3'-3 attached terminal deoxyabasic moeity
gugaauggcucaaggaacunn

SEQ ID NO: 1666 - RNA, 21 nt, Artificial Sequence
  Description of Artificial Sequence:  siNA sense region
  misc_feature (1)..(1): 5'-3 attached terminal deoxyabasic moeity
  misc_feature (1)..(4): 2'-deoxy
  misc_feature (5)..(6): 2'-deoxy-2'-Fluoro
  misc_feature (7)..(7): 2'-deoxy
  misc_feature (8)..(8): 2'-deoxy-2'-Fluoro
  misc_feature (9)..(9): 2'-deoxy
  misc_feature (10)..(10): 2'-deoxy-2'-Fluoro
  misc_feature (11)..(14): 2'-deoxy
  misc_feature (15)..(15): 2'-deoxy-2'-Fluoro
  misc_feature (16)..(17): 2'-deoxy
  misc_feature (18)..(19): 2'-deoxy-2'-Fluoro
  misc_feature (20)..(20): n stands for thymidine
  misc_feature (21)..(21): 3'-3 attached terminal deoxyabasic moeity
ggaacugugcaagaugaccnn

SEQ ID NO: 1667 - RNA, 21 nt, Artificial Sequence
  Description of Artificial Sequence:  siNA sense region
  misc_feature (1)..(1): 5'-3 attached terminal deoxyabasic moeity
  misc_feature (1)..(3): 2'-deoxy
  misc_feature (4)..(5): 2'-deoxy-2'-Fluoro
  misc_feature (6)..(6): 2'-deoxy
  misc_feature (7)..(9): 2'-deoxy-2'-Fluoro
  misc_feature (10)..(11): 2'-deoxy
  misc_feature (12)..(13): 2'-deoxy-2'-Fluoro
  misc_feature (14)..(14): 2'-deoxy
  misc_feature (15)..(19): 2'-deoxy-2'-Fluoro
  misc_feature (20)..(20): n stands for thymidine
  misc_feature (21)..(21): 3'-3 attached terminal deoxyabasic moeity
aagcugcucaaccaucuccnn

SEQ ID NO: 1668 - RNA, 21 nt, Artificial Sequence
  Description of Artificial Sequence:  siNA sense region
  misc_feature (1)..(1): 5'-3 attached terminal deoxyabasic moeity
  misc_feature (1)..(1): 2'-deoxy-2'-Fluoro
  misc_feature (2)..(3): 2'-deoxy
  misc_feature (4)..(5): 2'-deoxy-2'-Fluoro
  misc_feature (6)..(6): 2'-deoxy
  misc_feature (7)..(15): 2'-deoxy-2'-Fluoro
  misc_feature (16)..(16): 2'-deoxy
  misc_feature (17)..(17): 2'-deoxy-2'-Fluoro
  misc_feature (18)..(19): 2'-deoxy
  misc_feature (20)..(20): n stands for thymidine
  misc_feature (21)..(21): 3'-3 attached terminal deoxyabasic moeity
caaccaucuccuuccacagnn

SEQ ID NO: 1669 - RNA, 21 nt, Artificial Sequence
  Description of Artificial Sequence:  siNA antisense region
  misc_feature (1)..(2): 2'-deoxy
  misc_feature (3)..(8): 2'-deoxy-2'-Fluoro
  misc_feature (9)..(11): 2'-deoxy
  misc_feature (12)..(13): 2'-deoxy-2'-Fluoro
  misc_feature (14)..(14): 2'-deoxy
  misc_feature (15)..(17): 2'-deoxy-2'-Fluoro
  misc_feature (18)..(18): 2'-deoxy
  misc_feature (19)..(19): 2'-deoxy-2'-Fluoro
  misc_feature (20)..(20): Phosphorothioate 3'-Internucleotide Linkage
  misc_feature (21)..(21): n stands for thymidine
aguuccuugagccauucacnn

SEQ ID NO: 1670 - RNA, 21 nt, Artificial Sequence
  Description of Artificial Sequence:  siNA antisense region
  misc_feature (1)..(2): 2'-deoxy
  misc_feature (3)..(4): 2'-deoxy-2'-Fluoro
  misc_feature (5)..(5): 2'-deoxy
  misc_feature (6)..(9): 2'-deoxy-2'-Fluoro
  misc_feature (10)..(10): 2'-deoxy
  misc_feature (11)..(11): 2'-deoxy-2'-Fluoro
  misc_feature (12)..(12): 2'-deoxy
  misc_feature (13)..(13): 2'-deoxy-2'-Fluoro
  misc_feature (14)..(15): 2'-deoxy
  misc_feature (16)..(19): 2'-deoxy-2'-Fluoro
  misc_feature (20)..(20): Phosphorothioate 3'-Internucleotide Linkage
  misc_feature (21)..(21): n stands for thymidine
ggucaucuugcacaguuccnn

SEQ ID NO: 1671 - RNA, 21 nt, Artificial Sequence
  Description of Artificial Sequence:  siNA antisense region
  misc_feature (1)..(5): 2'-deoxy
  misc_feature (6)..(6): 2'-deoxy-2'-Fluoro
  misc_feature (7)..(8): 2'-deoxy
  misc_feature (9)..(10): 2'-deoxy-2'-Fluoro
  misc_feature (11)..(13): 2'-deoxy
  misc_feature (14)..(14): 2'-deoxy-2'-Fluoro
  misc_feature (15)..(16): 2'-deoxy
  misc_feature (17)..(19): 2'-deoxy-2'-Fluoro
  misc_feature (20)..(20): Phosphorothioate 3'-Internucleotide Linkage
  misc_feature (21)..(21): n stands for thymidine
ggagaugguugagcagcuunn

SEQ ID NO: 1672 - RNA, 21 nt, Artificial Sequence
  Description of Artificial Sequence:  siNA antisense region
  misc_feature (1)..(2): 2'-deoxy-2'-Fluoro
  misc_feature (3)..(3): 2'-deoxy
  misc_feature (4)..(4): 2'-deoxy-2'-Fluoro
  misc_feature (5)..(13): 2'-deoxy
  misc_feature (14)..(14): 2'-deoxy-2'-Fluoro
  misc_feature (15)..(16): 2'-deoxy
  misc_feature (17)..(18): 2'-deoxy-2'-Fluoro
  misc_feature (19)..(19): 2'-deoxy
  misc_feature (20)..(20): Phosphorothioate 3'-Internucleotide Linkage
  misc_feature (21)..(21): n stands for thymidine
cuguggaaggagaugguugnn

SEQ ID NO: 1673 - RNA, 21 nt, Artificial Sequence
  Description of Artificial Sequence:  siNA sense region
  misc_feature (1)..(1): 5'-3 attached terminal deoxyabasic moeity, inverted abasic, inverted nucleotide or other terminal cap that is optionally present
  misc_feature (20)..(21): n stands for any nucleotide
  misc_feature (21)..(21): 3'-3 attached terminal deoxyabasic moeity, inverted abasic, inverted nucleotide or other terminal cap that is optionally present
nnnnnnnnnnnnnnnnnnnnn

SEQ ID NO: 1674 - RNA, 21 nt, Artificial Sequence
  Description of Artificial Sequence:  siNA antisense region
  misc_feature (20)..(20): Phosphorothioate or Phosphorodithioate 3'-Internucleotide Linkage (optionally present)
  misc_feature (20)..(21): n stands for any nucleotide
  misc_feature (21)..(21): 3'-3 attached terminal glyceryl moeity or inverted deoxyabasic (optionally present)
nnnnnnnnnnnnnnnnnnnnn

SEQ ID NO: 1675 - RNA, 21 nt, Artificial Sequence
  Description of Artificial Sequence:  siNA sense region
  misc_feature (1)..(19): n stands for any nucleotide wherein any pyrimidine nucleotide present is 2'-Fluoro and any purine nucleotide present is 2'-O-methyl
  misc_feature (20)..(20): Phosphorothioate or Phosphorodithioate 3'-Internucleotide Linkage (optionally present)
  misc_feature (20)..(21): n stands for any nucleotide
nnnnnnnnnnnnnnnnnnnnn

SEQ ID NO: 1676 - RNA, 21 nt, Artificial Sequence
  Description of Artificial Sequence:  siNA antisense region
  misc_feature (1)..(19): n stands for any nucleotide wherein any pyrimidine nucleotide present is 2'-Fluoro and any purine nucleotide present is 2'-O-methyl
  misc_feature (20)..(20): Phosphorothioate or Phosphorodithioate 3'-Internucleotide Linkage (optionally present)
  misc_feature (20)..(21): n stands for any nucleotide
  misc_feature (21)..(21): 3'-3 attached terminal glyceryl moeity or inverted deoxyabasic (optionally present)
nnnnnnnnnnnnnnnnnnnnn

SEQ ID NO: 1677 - RNA, 21 nt, Artificial Sequence
  Description of Artificial Sequence:  siNA sense region
  misc_feature (1)..(19): n stands for any nucleotide wherein any pyrimidine nucleotide present is 2'-O-methyl or 2'-Fluoro
  misc_feature (1)..(1): 5'-3 attached terminal deoxyabasic moeity, inverted abasic, inverted nucleotide or other terminal cap that is optionally present
  misc_feature (20)..(21): n stands for any nucleotide
  misc_feature (21)..(21): 3'-3 attached terminal deoxyabasic moeity, inverted abasic, inverted nucleotide or other terminal cap that is optionally present
nnnnnnnnnnnnnnnnnnnnn

SEQ ID NO: 1678 - RNA, 21 nt, Artificial Sequence
  Description of Artificial Sequence:  siNA antisense region
  misc_feature (1)..(19): n stands for any nucleotide wherein any pyrimidine nucleotide present is 2'-Fluoro
  misc_feature (20)..(20): Phosphorothioate or Phosphorodithioate 3'-Internucleotide Linkage (optionally present)
  misc_feature (20)..(21): n stands for any nucleotide
  misc_feature (21)..(21): 3'-3 attached terminal glyceryl moeity or inverted deoxyabasic (optionally present)
nnnnnnnnnnnnnnnnnnnnn

SEQ ID NO: 1679 - RNA, 21 nt, Artificial Sequence
  Description of Artificial Sequence:  siNA sense region
  misc_feature (1)..(19): n stands for any nucleotide wherein any pyrimidine nucleotide present is 2'-Fluoro and any purine nucleotide present is 2'-Deoxy
  misc_feature (1)..(1): 5'-3 attached terminal deoxyabasic moeity, inverted abasic, inverted nucleotide or other terminal cap that is optionally present
  misc_feature (20)..(21): n stands for any nucleotide
  misc_feature (21)..(21): 3'-3 attached terminal deoxyabasic moeity, inverted abasic, inverted nucleotide or other terminal cap that is optionally present
nnnnnnnnnnnnnnnnnnnnn

SEQ ID NO: 1680 - RNA, 21 nt, Artificial Sequence
  Description of Artificial Sequence:  siNA sense region
  misc_feature (1)..(19): n stands for any nucleotide wherein any pyrimidine nucleotide present is 2'-Fluoro
  misc_feature (1)..(1): 5'-3 attached terminal deoxyabasic moeity, inverted abasic, inverted nucleotide or other terminal cap that is optionally present
  misc_feature (20)..(21): n stands for any nucleotide
  misc_feature (21)..(21): 3'-3 attached terminal deoxyabasic moeity, inverted abasic, inverted nucleotide or other terminal cap that is optionally present
nnnnnnnnnnnnnnnnnnnnn

SEQ ID NO: 1681 - RNA, 21 nt, Artificial Sequence
  Description of Artificial Sequence:  siNA antisense region
  misc_feature (1)..(19): n stands for any nucleotide wherein any pyrimidine nucleotide present is 2'-Fluoro and any purine nucleotide present is 2'-Deoxy
  misc_feature (20)..(20): Phosphorothioate or Phosphorodithioate 3'-Internucleotide Linkage (optionally present)
  misc_feature (20)..(21): n stands for any nucleotide
  misc_feature (21)..(21): 3'-3 attached terminal glyceryl moeity or inverted deoxyabasic (optionally present)
nnnnnnnnnnnnnnnnnnnnn

SEQ ID NO: 1682 - RNA, 21 nt, Artificial Sequence
  Description of Artificial Sequence:  siNA sense region
  misc_feature (1)..(1): 5'-3 attached terminal deoxyabasic moeity, inverted abasic, inverted nucleotide or other terminal cap that is optionally present
  misc_feature (20)..(20): n stands for thymidine
  misc_feature (21)..(21): 3'-3 attached terminal deoxyabasic moeity, inverted abasic, inverted nucleotide or other terminal cap that is optionally present
uccuugccuaugaggccucnn

SEQ ID NO: 1683 - RNA, 21 nt, Artificial Sequence
  Description of Artificial Sequence:  siNA antisense region
  misc_feature (20)..(20): Phosphorothioate or Phosphorodithioate 3'-Internucleotide Linkage (optionally present)
  misc_feature (21)..(21): 3'-3 attached terminal glyceryl moeity or inverted deoxyabasic (optionally present)
gaggccucauaggcaaggann

SEQ ID NO: 1684 - RNA, 21 nt, Artificial Sequence
  Description of Artificial Sequence:  siNA sense region
  misc_feature (1)..(5): 2'-deoxy-2'-fluoro
  misc_feature (6)..(6): 2'-O-Methyl
  misc_feature (7)..(9): 2'-deoxy-2'-fluoro
  misc_feature (10)..(10): 2'-O-Methyl
  misc_feature (11)..(11): 2'-deoxy-2'-fluoro
  misc_feature (12)..(15): 2'-O-Methyl
  misc_feature (16)..(19): 2'-deoxy-2'-fluoro
  misc_feature (20)..(20): Phosphorothioate or Phosphorodithioate 3'-Internucleotide Linkage (optionally present)
  misc_feature (21)..(21): n stands for thymidine
uccuugccuaugaggccucnn

SEQ ID NO: 1685 - RNA, 21 nt, Artificial Sequence
  Description of Artificial Sequence:  siNA antisense region
  misc_feature (1)..(4): 2'-O-Methyl
  misc_feature (5)..(8): 2'-deoxy-2'-fluoro
  misc_feature (9)..(9): 2'-O-Methyl
  misc_feature (10)..(10): 2'-deoxy-2'-fluoro
  misc_feature (11)..(13): 2'-O-Methyl
  misc_feature (14)..(14): 2'-deoxy-2'-fluoro
  misc_feature (15)..(19): 2'-O-Methyl
  misc_feature (20)..(20): Phosphorothioate or Phosphorodithioate 3'-Internucleotide Linkage (optionally present)
  misc_feature (21)..(21): 3'-3 attached terminal glyceryl moeity or inverted deoxyabasic (optionally present)
gaggccucauaggcaaggann

SEQ ID NO: 1686 - RNA, 21 nt, Artificial Sequence
  Description of Artificial Sequence:  siNA sense region
  misc_feature (1)..(1): 5'-3 attached terminal deoxyabasic moeity, inverted abasic, inverted nucleotide or other terminal cap that is optionally present
  misc_feature (1)..(5): 2'-O-Methyl or 2'-deoxy-2'-fluoro
  misc_feature (7)..(9): 2'-O-Methyl or 2'-deoxy-2'-fluoro
  misc_feature (11)..(11): 2'-O-Methyl or 2'-deoxy-2'-fluoro
  misc_feature (16)..(19): 2'-O-Methyl or 2'-deoxy-2'-fluoro
  misc_feature (20)..(20): n stands for thymidine
  misc_feature (21)..(21): 3'-3 attached terminal deoxyabasic moeity, inverted abasic, inverted nucleotide or other terminal cap that is optionally present
uccuugccuaugaggccucnn

SEQ ID NO: 1687 - RNA, 21 nt, Artificial Sequence
  Description of Artificial Sequence:  siNA antisense region
  misc_feature (5)..(8): 2'-deoxy-2'-fluoro
  misc_feature (10)..(10): 2'-deoxy-2'-fluoro
  misc_feature (14)..(14): 2'-deoxy-2'-fluoro
  misc_feature (20)..(20): Phosphorothioate or Phosphorodithioate 3'-Internucleotide Linkage (optionally present)
  misc_feature (21)..(21): 3'-3 attached terminal glyceryl moeity or inverted deoxyabasic (optionally present)
gaggccucauaggcaaggann

SEQ ID NO: 1688 - RNA, 21 nt, Artificial Sequence
  Description of Artificial Sequence:  siNA sense region
  misc_feature (1)..(1): 5'-3 attached terminal deoxyabasic moeity, inverted abasic, inverted nucleotide or other terminal cap that is optionally present
  misc_feature (1)..(5): 2'-deoxy-2'-fluoro
  misc_feature (6)..(6): 2'-deoxy
  misc_feature (7)..(9): 2'-deoxy-2'-fluoro
  misc_feature (10)..(10): 2'-deoxy
  misc_feature (11)..(11): 2'-deoxy-2'-fluoro
  misc_feature (12)..(15): 2'-deoxy
  misc_feature (16)..(19): 2'-deoxy-2'-fluoro
  misc_feature (20)..(20): n stands for thymidine
  misc_feature (21)..(21): 3'-3 attached terminal deoxyabasic moeity, inverted abasic, inverted nucleotide or other terminal cap that is optionally present
uccuugccuaugaggccucnn

SEQ ID NO: 1689 - RNA, 21 nt, Artificial Sequence
  Description of Artificial Sequence:  siNA sense region
  misc_feature (1)..(1): 5'-3 attached terminal deoxyabasic moeity, inverted abasic, inverted nucleotide or other terminal cap that is optionally present
  misc_feature (1)..(5): 2'-deoxy-2'-fluoro
  misc_feature (7)..(9): 2'-deoxy-2'-fluoro
  misc_feature (11)..(11): 2'-deoxy-2'-fluoro
  misc_feature (16)..(19): 2'-deoxy-2'-fluoro
  misc_feature (20)..(20): n stands for thymidine
  misc_feature (21)..(21): 3'-3 attached terminal deoxyabasic moeity, inverted abasic, inverted nucleotide or other terminal cap that is optionally present
uccuugccuaugaggccucnn

SEQ ID NO: 1690 - RNA, 21 nt, Artificial Sequence
  Description of Artificial Sequence:  siNA antisense region
  misc_feature (1)..(4): 2'-deoxy
  misc_feature (5)..(8): 2'-deoxy-2'-fluoro
  misc_feature (9)..(9): 2'-deoxy
  misc_feature (10)..(10): 2'-deoxy-2'-fluoro
  misc_feature (11)..(13): 2'-deoxy
  misc_feature (14)..(14): 2'-deoxy-2'-fluoro
  misc_feature (15)..(19): 2'-deoxy
  misc_feature (20)..(20): Phosphorothioate or Phosphorodithioate 3'-Internucleotide Linkage (optionally present)
  misc_feature (21)..(21): 3'-3 attached terminal glyceryl moeity or inverted deoxyabasic (optionally present)
gaggccucauaggcaaggann

SEQ ID NO: 1691 - RNA, 14 nt, Artificial Sequence
  Description of Artificial Sequence:  Target Sequence/duplex forming oligonucleotide
auauaucuauuucg

SEQ ID NO: 1692 - RNA, 14 nt, Artificial Sequence
  Description of Artificial Sequence:  Complementary Sequence/duplex forming oligonucleotide
cgaaauagauauau

SEQ ID NO: 1693 - RNA, 23 nt, Artificial Sequence
  Description of Artificial Sequence:  Self Complementary duplex construct
cgaaaauagauauaucuauuucg

SEQ ID NO: 1694 - RNA, 24 nt, Artificial Sequence
  Description of Artificial Sequence:  Duplex forming oligonucleotide
  misc_feature (20)..(20): n stands for thymidine
cgaaauagauauaucuauuucgnn

SEQ ID NO: 1695 - RNA, 23 nt, Artificial Sequence
  Description of Artificial Sequence:  Target Sequence/siNA sense region
cagacaccguugggaugaacuac

SEQ ID NO: 1696 - RNA, 23 nt, Artificial Sequence
  Description of Artificial Sequence:  Target Sequence/siNA sense region
aagaauauggccuuccagacguc

SEQ ID NO: 1697 - RNA, 23 nt, Artificial Sequence
  Description of Artificial Sequence:  Target Sequence/siNA sense region
gccuuacaaaacucuccacgguu

SEQ ID NO: 1698 - RNA, 23 nt, Artificial Sequence
  Description of Artificial Sequence:  Target Sequence/siNA sense region
ccacccacagaagaugaacuuug

SEQ ID NO: 1699 - RNA, 21 nt, Artificial Sequence
  Description of Artificial Sequence:  siNA sense region
  misc_feature (20)..(20): n stands for thymidine
gacaccguugggaugaacunn

SEQ ID NO: 1700 - RNA, 21 nt, Artificial Sequence
  Description of Artificial Sequence:  siNA sense region
  misc_feature (20)..(20): n stands for thymidine
gaauauggccuuccagacgnn

SEQ ID NO: 1701 - RNA, 21 nt, Artificial Sequence
  Description of Artificial Sequence:  siNA sense region
  misc_feature (20)..(21): n stands for thymidine
cuuacaaaacucuccacggnn

SEQ ID NO: 1702 - RNA, 21 nt, Artificial Sequence
  Description of Artificial Sequence:  siNA sense region
  misc_feature (20)..(21): n stands for thymidine
acccacagaagaugaacuunn

SEQ ID NO: 1703 - RNA, 21 nt, Artificial Sequence
  Description of Artificial Sequence:  siNA antisense region
  misc_feature (20)..(21): n stands for thymidine
aguucaucccaacggugucnn

SEQ ID NO: 1704 - RNA, 21 nt, Artificial Sequence
  Description of Artificial Sequence:  siNA antisense region
  misc_feature (20)..(21): n stands for thymidine
cgucuggaaggccauauucnn

SEQ ID NO: 1705 - RNA, 21 nt, Artificial Sequence
  Description of Artificial Sequence:  siNA antisense region
  misc_feature (20)..(21): n stands for thymidine
ccguggagaguuuuguaagnn

SEQ ID NO: 1706 - RNA, 21 nt, Artificial Sequence
  Description of Artificial Sequence:  siNA antisense region
  misc_feature (20)..(21): n stands for thymidine
aaguucaucuucugugggunn

SEQ ID NO: 1707 - RNA, 21 nt, Artificial Sequence
  Description of Artificial Sequence:  siNA sense region
  misc_feature (1)..(1): 5'-3 attached terminal deoxyabasic moeity
  misc_feature (3)..(3): 2'-deoxy-2'-Fluoro
  misc_feature (5)..(6): 2'-deoxy-2'-Fluoro
  misc_feature (8)..(9): 2'-deoxy-2'-Fluoro
  misc_feature (14)..(14): 2'-deoxy-2'-Fluoro
  misc_feature (18)..(19): 2'-deoxy-2'-Fluoro
  misc_feature (20)..(20): n stands for thymidine
  misc_feature (21)..(21): 3'-3 attached terminal deoxyabasic moeity
gacaccguugggaugaacunn

SEQ ID NO: 1708 - RNA, 21 nt, Artificial Sequence
  Description of Artificial Sequence:  siNA sense region
  misc_feature (1)..(1): 5'-3 attached terminal deoxyabasic moeity
  misc_feature (4)..(4): 2'-deoxy-2'-Fluoro
  misc_feature (6)..(6): 2'-deoxy-2'-Fluoro
  misc_feature (9)..(14): 2'-deoxy-2'-Fluoro
  misc_feature (18)..(18): 2'-deoxy-2'-Fluoro
  misc_feature (20)..(20): n stands for thymidine
  misc_feature (21)..(21): 3'-3 attached terminal deoxyabasic moeity
gaauauggccuuccagacgnn

SEQ ID NO: 1709 - RNA, 21 nt, Artificial Sequence
  Description of Artificial Sequence:  siNA sense region
  misc_feature (1)..(1): 5'-3 attached terminal deoxyabasic moeity
  misc_feature (1)..(3): 2'-deoxy-2'-Fluoro
  misc_feature (5)..(5): 2'-deoxy-2'-Fluoro
  misc_feature (10)..(15): 2'-deoxy-2'-Fluoro
  misc_feature (17)..(17): 2'-deoxy-2'-Fluoro
  misc_feature (20)..(20): n stands for thymidine
  misc_feature (21)..(21): 3'-3 attached terminal deoxyabasic moeity
cuuacaaaacucuccacggnn

SEQ ID NO: 1710 - RNA, 21 nt, Artificial Sequence
  Description of Artificial Sequence:  siNA sense region
  misc_feature (1)..(1): 5'-3 attached terminal deoxyabasic moeity
  misc_feature (2)..(4): 2'-deoxy-2'-Fluoro
  misc_feature (6)..(6): 2'-deoxy-2'-Fluoro
  misc_feature (13)..(13): 2'-deoxy-2'-Fluoro
  misc_feature (17)..(19): 2'-deoxy-2'-Fluoro
  misc_feature (20)..(20): n stands for thymidine
  misc_feature (21)..(21): 3'-3 attached terminal deoxyabasic moeity
acccacagaagaugaacuunn

SEQ ID NO: 1711 - RNA, 21 nt, Artificial Sequence
  Description of Artificial Sequence:  siNA antisense region
  misc_feature (3)..(5): 2'-deoxy-2'-Fluoro
  misc_feature (7)..(10): 2'-deoxy-2'-Fluoro
  misc_feature (13)..(13): 2'-deoxy-2'-Fluoro
  misc_feature (16)..(16): 2'-deoxy-2'-Fluoro
  misc_feature (18)..(19): 2'-deoxy-2'-Fluoro
  misc_feature (20)..(20): Phosphorothioate 3'-Internucleotide Linkage
  misc_feature (21)..(21): n stands for thymidine
aguucaucccaacggugucnn

SEQ ID NO: 1712 - RNA, 21 nt, Artificial Sequence
  Description of Artificial Sequence:  siNA antisense region
  misc_feature (1)..(1): 2'-deoxy-2'-Fluoro
  misc_feature (3)..(5): 2'-deoxy-2'-Fluoro
  misc_feature (12)..(13): 2'-deoxy-2'-Fluoro
  misc_feature (15)..(15): 2'-deoxy-2'-Fluoro
  misc_feature (17)..(19): 2'-deoxy-2'-Fluoro
  misc_feature (20)..(20): Phosphorothioate 3'-Internucleotide Linkage
  misc_feature (21)..(21): n stands for thymidine
cgucuggaaggccauauucnn

SEQ ID NO: 1713 - RNA, 21 nt, Artificial Sequence
  Description of Artificial Sequence:  siNA antisense region
  misc_feature (1)..(2): 2'-deoxy-2'-Fluoro
  misc_feature (4)..(4): 2'-deoxy-2'-Fluoro
  misc_feature (11)..(14): 2'-deoxy-2'-Fluoro
  misc_feature (16)..(16): 2'-deoxy-2'-Fluoro
  misc_feature (20)..(20): Phosphorothioate 3'-Internucleotide Linkage
  misc_feature (21)..(21): n stands for thymidine
ccguggagaguuuuguaagnn

SEQ ID NO: 1714 - RNA, 21 nt, Artificial Sequence
  Description of Artificial Sequence:  siNA antisense region
  misc_feature (4)..(6): 2'-deoxy-2'-Fluoro
  misc_feature (8)..(13): 2'-deoxy-2'-Fluoro
  misc_feature (15)..(15): 2'-deoxy-2'-Fluoro
  misc_feature (19)..(19): 2'-deoxy-2'-Fluoro
  misc_feature (20)..(20): Phosphorothioate 3'-Internucleotide Linkage
  misc_feature (21)..(21): n stands for thymidine
aaguucaucuucugugggunn

SEQ ID NO: 1715 - RNA, 21 nt, Artificial Sequence
  Description of Artificial Sequence:  siNA sense region
  misc_feature (1)..(1): 5'-3 attached terminal deoxyabasic moeity
  misc_feature (1)..(2): 2'-deoxy
  misc_feature (3)..(3): 2'-deoxy-2'-Fluoro
  misc_feature (4)..(4): 2'-deoxy
  misc_feature (5)..(6): 2'-deoxy-2'-Fluoro
  misc_feature (7)..(7): 2'-deoxy
  misc_feature (8)..(9): 2'-deoxy-2'-Fluoro
  misc_feature (10)..(13): 2'-deoxy
  misc_feature (14)..(14): 2'-deoxy-2'-Fluoro
  misc_feature (15)..(17): 2'-deoxy
  misc_feature (18)..(19): 2'-deoxy-2'-Fluoro
  misc_feature (20)..(20): n stands for thymidine
  misc_feature (21)..(21): 3'-3 attached terminal deoxyabasic moeity
gacaccguugggaugaacunn

SEQ ID NO: 1716 - RNA, 21 nt, Artificial Sequence
  Description of Artificial Sequence:  siNA sense region
  misc_feature (1)..(3): 2'-deoxy
  misc_feature (1)..(1): 5'-3 attached terminal deoxyabasic moeity
  misc_feature (4)..(4): 2'-deoxy-2'-Fluoro
  misc_feature (5)..(5): 2'-deoxy
  misc_feature (6)..(6): 2'-deoxy-2'-Fluoro
  misc_feature (7)..(8): 2'-deoxy
  misc_feature (9)..(14): 2'-deoxy-2'-Fluoro
  misc_feature (15)..(17): 2'-deoxy
  misc_feature (18)..(18): 2'-deoxy-2'-Fluoro
  misc_feature (19)..(19): 2'-deoxy
  misc_feature (20)..(20): n stands for thymidine
  misc_feature (21)..(21): 3'-3 attached terminal deoxyabasic moeity
gaauauggccuuccagacgnn

SEQ ID NO: 1717 - RNA, 21 nt, Artificial Sequence
  Description of Artificial Sequence:  siNA sense region
  misc_feature (1)..(3): 2'-deoxy-2'-Fluoro
  misc_feature (1)..(1): 5'-3 attached terminal deoxyabasic moeity
  misc_feature (4)..(4): 2'-deoxy
  misc_feature (5)..(5): 2'-deoxy-2'-Fluoro
  misc_feature (6)..(9): 2'-deoxy
  misc_feature (10)..(15): 2'-deoxy-2'-Fluoro
  misc_feature (16)..(16): 2'-deoxy
  misc_feature (17)..(17): 2'-deoxy-2'-Fluoro
  misc_feature (18)..(19): 2'-deoxy
  misc_feature (20)..(20): n stands for thymidine
  misc_feature (21)..(21): 3'-3 attached terminal deoxyabasic moeity
cuuacaaaacucuccacggnn

SEQ ID NO: 1718 - RNA, 21 nt, Artificial Sequence
  Description of Artificial Sequence:  siNA sense region
  misc_feature (1)..(1): 2'-deoxy
  misc_feature (1)..(1): 5'-3 attached terminal deoxyabasic moeity
  misc_feature (2)..(4): 2'-deoxy-2'-Fluoro
  misc_feature (5)..(5): 2'-deoxy
  misc_feature (6)..(6): 2'-deoxy-2'-Fluoro
  misc_feature (7)..(12): 2'-deoxy
  misc_feature (13)..(13): 2'-deoxy-2'-Fluoro
  misc_feature (14)..(16): 2'-deoxy
  misc_feature (17)..(19): 2'-deoxy-2'-Fluoro
  misc_feature (20)..(20): n stands for thymidine
  misc_feature (21)..(21): 3'-3 attached terminal deoxyabasic moeity
acccacagaagaugaacuunn

SEQ ID NO: 1719 - RNA, 21 nt, Artificial Sequence
  Description of Artificial Sequence:  siNA antisense region
  misc_feature (1)..(2): 2'-deoxy
  misc_feature (3)..(5): 2'-deoxy-2'-Fluoro
  misc_feature (6)..(6): 2'-deoxy
  misc_feature (7)..(10): 2'-deoxy-2'-Fluoro
  misc_feature (11)..(12): 2'-deoxy
  misc_feature (13)..(13): 2'-deoxy-2'-Fluoro
  misc_feature (14)..(15): 2'-deoxy
  misc_feature (16)..(16): 2'-deoxy-2'-Fluoro
  misc_feature (17)..(17): 2'-deoxy
  misc_feature (18)..(19): 2'-deoxy-2'-Fluoro
  misc_feature (20)..(20): Phosphorothioate 3'-Internucleotide Linkage
  misc_feature (21)..(21): n stands for thymidine
aguucaucccaacggugucnn

SEQ ID NO: 1720 - RNA, 21 nt, Artificial Sequence
  Description of Artificial Sequence:  siNA antisense region
  misc_feature (1)..(1): 2'-deoxy-2'-Fluoro
  misc_feature (2)..(2): 2'-deoxy
  misc_feature (3)..(5): 2'-deoxy-2'-Fluoro
  misc_feature (6)..(11): 2'-deoxy
  misc_feature (12)..(13): 2'-deoxy-2'-Fluoro
  misc_feature (14)..(14): 2'-deoxy
  misc_feature (15)..(15): 2'-deoxy-2'-Fluoro
  misc_feature (16)..(16): 2'-deoxy
  misc_feature (17)..(19): 2'-deoxy-2'-Fluoro
  misc_feature (20)..(20): Phosphorothioate 3'-Internucleotide Linkage
  misc_feature (21)..(21): n stands for thymidine
cgucuggaaggccauauucnn

SEQ ID NO: 1721 - RNA, 21 nt, Artificial Sequence
  Description of Artificial Sequence:  siNA antisense region
  misc_feature (1)..(2): 2'-deoxy-2'-Fluoro
  misc_feature (3)..(3): 2'-deoxy
  misc_feature (4)..(4): 2'-deoxy-2'-Fluoro
  misc_feature (5)..(10): 2'-deoxy
  misc_feature (11)..(14): 2'-deoxy-2'-Fluoro
  misc_feature (15)..(15): 2'-deoxy
  misc_feature (16)..(16): 2'-deoxy-2'-Fluoro
  misc_feature (17)..(19): 2'-deoxy
  misc_feature (20)..(20): Phosphorothioate 3'-Internucleotide Linkage
  misc_feature (21)..(21): n stands for thymidine
ccguggagaguuuuguaagnn

SEQ ID NO: 1722 - RNA, 21 nt, Artificial Sequence
  Description of Artificial Sequence:  siNA antisense region
  misc_feature (1)..(3): 2'-deoxy
  misc_feature (4)..(6): 2'-deoxy-2'-Fluoro
  misc_feature (7)..(7): 2'-deoxy
  misc_feature (8)..(13): 2'-deoxy-2'-Fluoro
  misc_feature (14)..(14): 2'-deoxy
  misc_feature (15)..(15): 2'-deoxy-2'-Fluoro
  misc_feature (16)..(18): 2'-deoxy
  misc_feature (19)..(19): 2'-deoxy-2'-Fluoro
  misc_feature (20)..(20): Phosphorothioate 3'-Internucleotide Linkage
  misc_feature (21)..(21): n stands for thymidine
aaguucaucuucugugggunn

SEQ ID NO: 1723 - RNA, 21 nt, Artificial Sequence
  Description of Artificial Sequence:  siNA sense region
  misc_feature (1)..(1): 5'-3 attached terminal deoxyabasic moeity
  misc_feature (1)..(1): 2'-O-methyl
  misc_feature (2)..(2): 2'-deoxy-2'-Fluoro
  misc_feature (3)..(5): 2'-O-methyl
  misc_feature (6)..(6): 2'-deoxy-2'-Fluoro
  misc_feature (7)..(8): 2'-O-methyl
  misc_feature (9)..(11): 2'-deoxy-2'-Fluoro
  misc_feature (12)..(17): 2'-O-methyl
  misc_feature (18)..(19): 2'-deoxy-2'-Fluoro
  misc_feature (20)..(20): n stands for thymidine
  misc_feature (21)..(21): 3'-3 attached terminal deoxyabasic moeity
gugaauggcucaaggaacunn

SEQ ID NO: 1724 - RNA, 21 nt, Artificial Sequence
  Description of Artificial Sequence:  siNA sense region
  misc_feature (1)..(1): 5'-3 attached terminal deoxyabasic moeity
  misc_feature (1)..(2): 2'-O-methyl
  misc_feature (3)..(3): 2'-deoxy-2'-Fluoro
  misc_feature (4)..(4): 2'-O-methyl
  misc_feature (5)..(6): 2'-deoxy-2'-Fluoro
  misc_feature (7)..(7): 2'-O-methyl
  misc_feature (8)..(9): 2'-deoxy-2'-Fluoro
  misc_feature (10)..(13): 2'-O-methyl
  misc_feature (14)..(14): 2'-deoxy-2'-Fluoro
  misc_feature (15)..(17): 2'-O-methyl
  misc_feature (18)..(19): 2'-deoxy-2'-Fluoro
  misc_feature (20)..(20): n stands for thymidine
  misc_feature (21)..(21): 3'-3 attached terminal deoxyabasic moeity
gacaccguugggaugaacunn

SEQ ID NO: 1725 - RNA, 21 nt, Artificial Sequence
  Description of Artificial Sequence:  siNA sense region
  misc_feature (1)..(1): 5'-3 attached terminal deoxyabasic moeity
  misc_feature (1)..(3): 2'-O-methyl
  misc_feature (4)..(4): 2'-deoxy-2'-Fluoro
  misc_feature (5)..(5): 2'-O-methyl
  misc_feature (6)..(6): 2'-deoxy-2'-Fluoro
  misc_feature (7)..(8): 2'-O-methyl
  misc_feature (9)..(14): 2'-deoxy-2'-Fluoro
  misc_feature (15)..(17): 2'-O-methyl
  misc_feature (18)..(18): 2'-deoxy-2'-Fluoro
  misc_feature (19)..(19): 2'-O-methyl
  misc_feature (20)..(20): n stands for thymidine
  misc_feature (21)..(21): 3'-3 attached terminal deoxyabasic moeity
gaauauggccuuccagacgnn

SEQ ID NO: 1726 - RNA, 21 nt, Artificial Sequence
  Description of Artificial Sequence:  siNA sense region
  misc_feature (1)..(1): 5'-3 attached terminal deoxyabasic moeity
  misc_feature (1)..(4): 2'-O-methyl
  misc_feature (5)..(6): 2'-deoxy-2'-Fluoro
  misc_feature (7)..(7): 2'-O-methyl
  misc_feature (8)..(8): 2'-deoxy-2'-Fluoro
  misc_feature (9)..(9): 2'-O-methyl
  misc_feature (10)..(10): 2'-deoxy-2'-Fluoro
  misc_feature (11)..(14): 2'-O-methyl
  misc_feature (15)..(15): 2'-deoxy-2'-Fluoro
  misc_feature (16)..(17): 2'-O-methyl
  misc_feature (18)..(19): 2'-deoxy-2'-Fluoro
  misc_feature (20)..(20): n stands for thymidine
  misc_feature (21)..(21): 3'-3 attached terminal deoxyabasic moeity
ggaacugugcaagaugaccnn

SEQ ID NO: 1727 - RNA, 21 nt, Artificial Sequence
  Description of Artificial Sequence:  siNA sense region
  misc_feature (1)..(1): 5'-3 attached terminal deoxyabasic moeity
  misc_feature (1)..(3): 2'-deoxy-2'-Fluoro
  misc_feature (4)..(4): 2'-O-methyl
  misc_feature (5)..(5): 2'-deoxy-2'-Fluoro
  misc_feature (6)..(9): 2'-O-methyl
  misc_feature (10)..(15): 2'-deoxy-2'-Fluoro
  misc_feature (16)..(16): 2'-O-methyl
  misc_feature (17)..(17): 2'-deoxy-2'-Fluoro
  misc_feature (18)..(19): 2'-O-methyl
  misc_feature (20)..(20): n stands for thymidine
  misc_feature (21)..(21): 3'-3 attached terminal deoxyabasic moeity
cuuacaaaacucuccacggnn

SEQ ID NO: 1728 - RNA, 21 nt, Artificial Sequence
  Description of Artificial Sequence:  siNA sense region
  misc_feature (1)..(1): 5'-3 attached terminal deoxyabasic moeity
  misc_feature (1)..(3): 2'-O-methyl
  misc_feature (4)..(5): 2'-deoxy-2'-Fluoro
  misc_feature (6)..(6): 2'-O-methyl
  misc_feature (7)..(9): 2'-deoxy-2'-Fluoro
  misc_feature (10)..(11): 2'-O-methyl
  misc_feature (12)..(13): 2'-deoxy-2'-Fluoro
  misc_feature (14)..(14): 2'-O-methyl
  misc_feature (15)..(19): 2'-deoxy-2'-Fluoro
  misc_feature (20)..(20): n stands for thymidine
  misc_feature (21)..(21): 3'-3 attached terminal deoxyabasic moeity
aagcugcucaaccaucuccnn

SEQ ID NO: 1729 - RNA, 21 nt, Artificial Sequence
  Description of Artificial Sequence:  siNA sense region
  misc_feature (1)..(1): 5'-3 attached terminal deoxyabasic moeity
  misc_feature (1)..(1): 2'-deoxy-2'-Fluoro
  misc_feature (2)..(3): 2'-O-methyl
  misc_feature (4)..(5): 2'-deoxy-2'-Fluoro
  misc_feature (6)..(6): 2'-O-methyl
  misc_feature (7)..(15): 2'-deoxy-2'-Fluoro
  misc_feature (16)..(16): 2'-O-methyl
  misc_feature (17)..(17): 2'-deoxy-2'-Fluoro
  misc_feature (18)..(19): 2'-O-methyl
  misc_feature (20)..(20): n stands for thymidine
  misc_feature (21)..(21): 3'-3 attached terminal deoxyabasic moeity
caaccaucuccuuccacagnn

SEQ ID NO: 1730 - RNA, 21 nt, Artificial Sequence
  Description of Artificial Sequence:  siNA sense region
  misc_feature (1)..(1): 5'-3 attached terminal deoxyabasic moeity
  misc_feature (1)..(1): 2'-O-methyl
  misc_feature (2)..(4): 2'-deoxy-2'-Fluoro
  misc_feature (5)..(5): 2'-O-methyl
  misc_feature (6)..(6): 2'-deoxy-2'-Fluoro
  misc_feature (7)..(12): 2'-O-methyl
  misc_feature (13)..(13): 2'-deoxy-2'-Fluoro
  misc_feature (14)..(16): 2'-O-methyl
  misc_feature (17)..(19): 2'-deoxy-2'-Fluoro
  misc_feature (20)..(20): n stands for thymidine
  misc_feature (21)..(21): 3'-3 attached terminal deoxyabasic moeity
acccacagaagaugaacuunn

SEQ ID NO: 1731 - RNA, 21 nt, Artificial Sequence
  Description of Artificial Sequence:  siNA antisense region
  misc_feature (1)..(2): 2'-O-methyl
  misc_feature (3)..(8): 2'-deoxy-2'-Fluoro
  misc_feature (9)..(11): 2'-O-methyl
  misc_feature (12)..(13): 2'-deoxy-2'-Fluoro
  misc_feature (14)..(14): 2'-O-methyl
  misc_feature (15)..(17): 2'-deoxy-2'-Fluoro
  misc_feature (18)..(18): 2'-O-methyl
  misc_feature (19)..(19): 2'-deoxy-2'-Fluoro
  misc_feature (20)..(20): Phosphorothioate 3'-Internucleotide Linkage
  misc_feature (21)..(21): n stands for thymidine
aguuccuugagccauucacnn

SEQ ID NO: 1732 - RNA, 21 nt, Artificial Sequence
  Description of Artificial Sequence:  siNA antisense region
  misc_feature (1)..(2): 2'-O-methyl
  misc_feature (3)..(5): 2'-deoxy-2'-Fluoro
  misc_feature (6)..(6): 2'-O-methyl
  misc_feature (7)..(10): 2'-deoxy-2'-Fluoro
  misc_feature (11)..(12): 2'-O-methyl
  misc_feature (13)..(13): 2'-deoxy-2'-Fluoro
  misc_feature (14)..(15): 2'-O-methyl
  misc_feature (16)..(16): 2'-deoxy-2'-Fluoro
  misc_feature (17)..(17): 2'-O-methyl
  misc_feature (18)..(19): 2'-deoxy-2'-Fluoro
  misc_feature (20)..(20): Phosphorothioate 3'-Internucleotide Linkage
  misc_feature (21)..(21): n stands for thymidine
aguucaucccaacggugucnn

SEQ ID NO: 1733 - RNA, 21 nt, Artificial Sequence
  Description of Artificial Sequence:  siNA antisense region
  misc_feature (1)..(1): 2'-deoxy-2'-Fluoro
  misc_feature (2)..(2): 2'-O-methyl
  misc_feature (3)..(5): 2'-deoxy-2'-Fluoro
  misc_feature (6)..(11): 2'-O-methyl
  misc_feature (12)..(13): 2'-deoxy-2'-Fluoro
  misc_feature (14)..(14): 2'-O-methyl
  misc_feature (15)..(15): 2'-deoxy-2'-Fluoro
  misc_feature (16)..(16): 2'-O-methyl
  misc_feature (17)..(19): 2'-deoxy-2'-Fluoro
  misc_feature (20)..(20): Phosphorothioate 3'-Internucleotide Linkage
  misc_feature (21)..(21): n stands for thymidine
cgucuggaaggccauauucnn

SEQ ID NO: 1734 - RNA, 21 nt, Artificial Sequence
  Description of Artificial Sequence:  siNA antisense region
  misc_feature (1)..(2): 2'-O-methyl
  misc_feature (3)..(4): 2'-deoxy-2'-Fluoro
  misc_feature (5)..(5): 2'-O-methyl
  misc_feature (6)..(9): 2'-deoxy-2'-Fluoro
  misc_feature (10)..(10): 2'-O-methyl
  misc_feature (11)..(11): 2'-deoxy-2'-Fluoro
  misc_feature (12)..(12): 2'-O-methyl
  misc_feature (13)..(13): 2'-deoxy-2'-Fluoro
  misc_feature (14)..(15): 2'-O-methyl
  misc_feature (16)..(19): 2'-deoxy-2'-Fluoro
  misc_feature (20)..(20): Phosphorothioate 3'-Internucleotide Linkage
  misc_feature (21)..(21): n stands for thymidine
ggucaucuugcacaguuccnn

SEQ ID NO: 1735 - RNA, 21 nt, Artificial Sequence
  Description of Artificial Sequence:  siNA antisense region
  misc_feature (1)..(2): 2'-deoxy-2'-Fluoro
  misc_feature (3)..(3): 2'-O-methyl
  misc_feature (4)..(4): 2'-deoxy-2'-Fluoro
  misc_feature (5)..(10): 2'-O-methyl
  misc_feature (11)..(14): 2'-deoxy-2'-Fluoro
  misc_feature (15)..(15): 2'-O-methyl
  misc_feature (16)..(16): 2'-deoxy-2'-Fluoro
  misc_feature (17)..(19): 2'-O-methyl
  misc_feature (20)..(20): Phosphorothioate 3'-Internucleotide Linkage
  misc_feature (21)..(21): n stands for thymidine
ccguggagaguuuuguaagnn

SEQ ID NO: 1736 - RNA, 21 nt, Artificial Sequence
  Description of Artificial Sequence:  siNA antisense region
  misc_feature (1)..(5): 2'-O-methyl
  misc_feature (6)..(6): 2'-deoxy-2'-Fluoro
  misc_feature (7)..(8): 2'-O-methyl
  misc_feature (9)..(10): 2'-deoxy-2'-Fluoro
  misc_feature (11)..(13): 2'-O-methyl
  misc_feature (14)..(15): 2'-deoxy-2'-Fluoro
  misc_feature (16)..(17): 2'-O-methyl
  misc_feature (18)..(19): 2'-deoxy-2'-Fluoro
  misc_feature (20)..(20): Phosphorothioate 3'-Internucleotide Linkage
  misc_feature (21)..(21): n stands for thymidine
ggagaugguugagcagcuunn

SEQ ID NO: 1737 - RNA, 21 nt, Artificial Sequence
  Description of Artificial Sequence:  siNA antisense region
  misc_feature (1)..(2): 2'-deoxy-2'-Fluoro
  misc_feature (3)..(3): 2'-O-methyl
  misc_feature (4)..(4): 2'-deoxy-2'-Fluoro
  misc_feature (5)..(13): 2'-O-methyl
  misc_feature (14)..(14): 2'-deoxy-2'-Fluoro
  misc_feature (15)..(16): 2'-O-methyl
  misc_feature (17)..(18): 2'-deoxy-2'-Fluoro
  misc_feature (19)..(19): 2'-O-methyl
  misc_feature (20)..(20): Phosphorothioate 3'-Internucleotide Linkage
  misc_feature (21)..(21): n stands for thymidine
cuguggaaggagaugguugnn

SEQ ID NO: 1738 - RNA, 21 nt, Artificial Sequence
  Description of Artificial Sequence:  siNA antisense region
  misc_feature (1)..(3): 2'-O-methyl
  misc_feature (4)..(6): 2'-deoxy-2'-Fluoro
  misc_feature (7)..(7): 2'-O-methyl
  misc_feature (8)..(13): 2'-deoxy-2'-Fluoro
  misc_feature (14)..(14): 2'-O-methyl
  misc_feature (15)..(15): 2'-deoxy-2'-Fluoro
  misc_feature (16)..(18): 2'-O-methyl
  misc_feature (19)..(19): 2'-deoxy-2'-Fluoro
  misc_feature (20)..(20): Phosphorothioate 3'-Internucleotide Linkage
  misc_feature (21)..(21): n stands for thymidine
aaguucaucuucugugggunn

SEQ ID NO: 1739 - RNA, 21 nt, Artificial Sequence
  Description of Artificial Sequence:  siNA sense region
  misc_feature (1)..(1): 5'-3 attached terminal deoxyabasic moeity
  misc_feature (20)..(20): n stands for thymidine
  misc_feature (21)..(21): 3'-3 attached terminal deoxyabasic moeity
gugaauggcucaaggaacunn

SEQ ID NO: 1740 - RNA, 21 nt, Artificial Sequence
  Description of Artificial Sequence:  siNA sense region
  misc_feature (1)..(1): 5'-3 attached terminal deoxyabasic moeity
  misc_feature (20)..(20): n stands for thymidine
  misc_feature (21)..(21): 3'-3 attached terminal deoxyabasic moeity
gacaccguugggaugaacunn

SEQ ID NO: 1741 - RNA, 21 nt, Artificial Sequence
  Description of Artificial Sequence:  siNA sense region
  misc_feature (1)..(1): 5'-3 attached terminal deoxyabasic moeity
  misc_feature (20)..(20): n stands for thymidine
  misc_feature (21)..(21): 3'-3 attached terminal deoxyabasic moeity
gaauauggccuuccagacgnn

SEQ ID NO: 1742 - RNA, 21 nt, Artificial Sequence
  Description of Artificial Sequence:  siNA sense region
  misc_feature (1)..(1): 5'-3 attached terminal deoxyabasic moeity
  misc_feature (20)..(20): n stands for thymidine
  misc_feature (21)..(21): 3'-3 attached terminal deoxyabasic moeity
ggaacugugcaagaugaccnn

SEQ ID NO: 1743 - RNA, 21 nt, Artificial Sequence
  Description of Artificial Sequence:  siNA sense region
  misc_feature (1)..(1): 5'-3 attached terminal deoxyabasic moeity
  misc_feature (20)..(20): n stands for thymidine
  misc_feature (21)..(21): 3'-3 attached terminal deoxyabasic moeity
cuuacaaaacucuccacggnn

SEQ ID NO: 1744 - RNA, 21 nt, Artificial Sequence
  Description of Artificial Sequence:  siNA sense region
  misc_feature (1)..(1): 5'-3 attached terminal deoxyabasic moeity
  misc_feature (20)..(20): n stands for thymidine
  misc_feature (21)..(21): 3'-3 attached terminal deoxyabasic moeity
aagcugcucaaccaucuccnn

SEQ ID NO: 1745 - RNA, 21 nt, Artificial Sequence
  Description of Artificial Sequence:  siNA sense region
  misc_feature (1)..(1): 5'-3 attached terminal deoxyabasic moeity
  misc_feature (20)..(20): n stands for thymidine
  misc_feature (21)..(21): 3'-3 attached terminal deoxyabasic moeity
caaccaucuccuuccacagnn

SEQ ID NO: 1746 - RNA, 21 nt, Artificial Sequence
  Description of Artificial Sequence:  siNA sense region
  misc_feature (1)..(1): 5'-3 attached terminal deoxyabasic moeity
  misc_feature (20)..(20): n stands for thymidine
  misc_feature (21)..(21): 3'-3 attached terminal deoxyabasic moeity
acccacagaagaugaacuunn

SEQ ID NO: 1747 - RNA, 21 nt, Artificial Sequence
  Description of Artificial Sequence:  siNA antisense region
  misc_feature (20)..(20): Phosphorothioate 3'-Internucleotide Linkage
  misc_feature (21)..(21): n stands for thymidine
aguuccuugagccauucacnn

SEQ ID NO: 1748 - RNA, 21 nt, Artificial Sequence
  Description of Artificial Sequence:  siNA antisense region
  misc_feature (20)..(20): Phosphorothioate 3'-Internucleotide Linkage
  misc_feature (21)..(21): n stands for thymidine
aguucaucccaacggugucnn

SEQ ID NO: 1749 - RNA, 21 nt, Artificial Sequence
  Description of Artificial Sequence:  siNA antisense region
  misc_feature (20)..(20): Phosphorothioate 3'-Internucleotide Linkage
  misc_feature (21)..(21): n stands for thymidine
cgucuggaaggccauauucnn

SEQ ID NO: 1750 - RNA, 21 nt, Artificial Sequence
  Description of Artificial Sequence:  siNA antisense region
  misc_feature (20)..(20): Phosphorothioate 3'-Internucleotide Linkage
  misc_feature (21)..(21): n stands for thymidine
ggucaucuugcacaguuccnn

SEQ ID NO: 1751 - RNA, 21 nt, Artificial Sequence
  Description of Artificial Sequence:  siNA antisense region
  misc_feature (20)..(20): Phosphorothioate 3'-Internucleotide Linkage
  misc_feature (21)..(21): n stands for thymidine
ccguggagaguuuuguaagnn

SEQ ID NO: 1752 - RNA, 21 nt, Artificial Sequence
  Description of Artificial Sequence:  siNA antisense region
  misc_feature (20)..(20): Phosphorothioate 3'-Internucleotide Linkage
  misc_feature (21)..(21): n stands for thymidine
ggagaugguugagcagcuunn

SEQ ID NO: 1753 - RNA, 21 nt, Artificial Sequence
  Description of Artificial Sequence:  siNA antisense region
  misc_feature (20)..(20): Phosphorothioate 3'-Internucleotide Linkage
  misc_feature (21)..(21): n stands for thymidine
cuguggaaggagaugguugnn

SEQ ID NO: 1754 - RNA, 21 nt, Artificial Sequence
  Description of Artificial Sequence:  siNA antisense region
  misc_feature (20)..(20): Phosphorothioate 3'-Internucleotide Linkage
  misc_feature (21)..(21): n stands for thymidine
aaguucaucuucugugggunn

SEQ ID NO: 1755 - RNA, 21 nt, Artificial Sequence
  Description of Artificial Sequence:  siNA antisense region
  misc_feature (1)..(2): 2'-O-methyl
  misc_feature (3)..(8): 2'-deoxy-2'-Fluoro
  misc_feature (9)..(11): 2'-O-methyl
  misc_feature (12)..(13): 2'-deoxy-2'-Fluoro
  misc_feature (14)..(14): 2'-O-methyl
  misc_feature (15)..(17): 2'-deoxy-2'-Fluoro
  misc_feature (18)..(18): 2'-O-methyl
  misc_feature (19)..(19): 2'-deoxy-2'-Fluoro
  misc_feature (20)..(20): n stands for thymidine
  misc_feature (21)..(21): 3'-3 attached terminal deoxyabasic moeity
aguuccuugagccauucacnn

SEQ ID NO: 1756 - RNA, 21 nt, Artificial Sequence
  Description of Artificial Sequence:  siNA antisense region
  misc_feature (1)..(2): 2'-O-methyl
  misc_feature (3)..(5): 2'-deoxy-2'-Fluoro
  misc_feature (6)..(6): 2'-O-methyl
  misc_feature (7)..(10): 2'-deoxy-2'-Fluoro
  misc_feature (11)..(12): 2'-O-methyl
  misc_feature (13)..(13): 2'-deoxy-2'-Fluoro
  misc_feature (14)..(15): 2'-O-methyl
  misc_feature (16)..(16): 2'-deoxy-2'-Fluoro
  misc_feature (17)..(17): 2'-O-methyl
  misc_feature (18)..(19): 2'-deoxy-2'-Fluoro
  misc_feature (20)..(20): n stands for thymidine
  misc_feature (21)..(21): 3'-3 attached terminal deoxyabasic moeity
aguucaucccaacggugucnn

SEQ ID NO: 1757 - RNA, 21 nt, Artificial Sequence
  Description of Artificial Sequence:  siNA antisense region
  misc_feature (1)..(1): 2'-deoxy-2'-Fluoro
  misc_feature (2)..(2): 2'-O-methyl
  misc_feature (3)..(5): 2'-deoxy-2'-Fluoro
  misc_feature (6)..(11): 2'-O-methyl
  misc_feature (12)..(13): 2'-deoxy-2'-Fluoro
  misc_feature (14)..(14): 2'-O-methyl
  misc_feature (15)..(15): 2'-deoxy-2'-Fluoro
  misc_feature (16)..(16): 2'-O-methyl
  misc_feature (17)..(19): 2'-deoxy-2'-Fluoro
  misc_feature (20)..(20): n stands for thymidine
  misc_feature (21)..(21): 3'-3 attached terminal deoxyabasic moeity
cgucuggaaggccauauucnn

SEQ ID NO: 1758 - RNA, 21 nt, Artificial Sequence
  Description of Artificial Sequence:  siNA antisense region
  misc_feature (1)..(2): 2'-O-methyl
  misc_feature (3)..(4): 2'-deoxy-2'-Fluoro
  misc_feature (5)..(5): 2'-O-methyl
  misc_feature (6)..(9): 2'-deoxy-2'-Fluoro
  misc_feature (10)..(10): 2'-O-methyl
  misc_feature (11)..(11): 2'-deoxy-2'-Fluoro
  misc_feature (12)..(12): 2'-O-methyl
  misc_feature (13)..(13): 2'-deoxy-2'-Fluoro
  misc_feature (14)..(15): 2'-O-methyl
  misc_feature (16)..(19): 2'-deoxy-2'-Fluoro
  misc_feature (20)..(20): n stands for thymidine
  misc_feature (21)..(21): 3'-3 attached terminal deoxyabasic moeity
ggucaucuugcacaguuccnn

SEQ ID NO: 1759 - RNA, 21 nt, Artificial Sequence
  Description of Artificial Sequence:  siNA antisense region
  misc_feature (1)..(2): 2'-deoxy-2'-fluoro
  misc_feature (3)..(3): 2'-O-methyl
  misc_feature (4)..(4): 2'-deoxy-2'-fluoro
  misc_feature (5)..(10): 2'-O-methyl
  misc_feature (11)..(14): 2'-deoxy-2'-fluoro
  misc_feature (15)..(15): 2'-O-methyl
  misc_feature (16)..(16): 2'-deoxy-2'-fluoro
  misc_feature (17)..(19): 2'-O-methyl
  misc_feature (20)..(20): n stands for thymidine
  misc_feature (21)..(21): 3'-3 attached terminal deoxyabasic moeity
ccguggagaguuuuguaagnn

SEQ ID NO: 1760 - RNA, 21 nt, Artificial Sequence
  Description of Artificial Sequence:  siNA antisense region
  misc_feature (1)..(5): 2'-O-methyl
  misc_feature (6)..(6): 2'-deoxy-2'-fluoro
  misc_feature (7)..(8): 2'-O-methyl
  misc_feature (9)..(10): 2'-deoxy-2'-fluoro
  misc_feature (11)..(13): 2'-O-methyl
  misc_feature (14)..(14): 2'-deoxy-2'-fluoro
  misc_feature (15)..(16): 2'-O-methyl
  misc_feature (17)..(19): 2'-deoxy-2'-fluoro
  misc_feature (20)..(20): n stands for thymidine
  misc_feature (21)..(21): 3'-3 attached terminal deoxyabasic moeity
ggagaugguugagcagcuunn

SEQ ID NO: 1761 - RNA, 21 nt, Artificial Sequence
  Description of Artificial Sequence:  siNA antisense region
  misc_feature (1)..(2): 2'-deoxy-2'-fluoro
  misc_feature (3)..(3): 2'-O-methyl
  misc_feature (4)..(4): 2'-deoxy-2'-fluoro
  misc_feature (5)..(13): 2'-O-methyl
  misc_feature (14)..(14): 2'-deoxy-2'-fluoro
  misc_feature (15)..(16): 2'-O-methyl
  misc_feature (17)..(18): 2'-deoxy-2'-fluoro
  misc_feature (19)..(19): 2'-O-methyl
  misc_feature (20)..(20): n stands for thymidine
  misc_feature (21)..(21): 3'-3 attached terminal deoxyabasic moeity
cuguggaaggagaugguugnn

SEQ ID NO: 1762 - RNA, 21 nt, Artificial Sequence
  Description of Artificial Sequence:  siNA antisense region
  misc_feature (1)..(3): 2'-O-methyl
  misc_feature (4)..(6): 2'-deoxy-2'-fluoro
  misc_feature (7)..(7): 2'-O-methyl
  misc_feature (8)..(13): 2'-deoxy-2'-fluoro
  misc_feature (14)..(14): 2'-O-methyl
  misc_feature (15)..(15): 2'-deoxy-2'-fluoro
  misc_feature (16)..(18): 2'-O-methyl
  misc_feature (19)..(19): 2'-deoxy-2'-fluoro
  misc_feature (20)..(20): n stands for thymidine
  misc_feature (21)..(21): 3'-3 attached terminal deoxyabasic moeity
aaguucaucuucugugggunn

SEQ ID NO: 1763 - RNA, 21 nt, Artificial Sequence
  Description of Artificial Sequence:  siNA antisense region
  misc_feature (20)..(20): n stands for thymidine
  misc_feature (21)..(21): 3'-3 attached terminal deoxyabasic moeity
aguuccuugagccauucacnn

SEQ ID NO: 1764 - RNA, 21 nt, Artificial Sequence
  Description of Artificial Sequence:  siNA antisense region
  misc_feature (20)..(20): n stands for thymidine
  misc_feature (21)..(21): 3'-3 attached terminal deoxyabasic moeity
aguucaucccaacggugucnn

SEQ ID NO: 1765 - RNA, 21 nt, Artificial Sequence
  Description of Artificial Sequence:  siNA antisense region
  misc_feature (20)..(20): n stands for thymidine
  misc_feature (21)..(21): 3'-3 attached terminal deoxyabasic moeity
cgucuggaaggccauauucnn

SEQ ID NO: 1766 - RNA, 21 nt, Artificial Sequence
  Description of Artificial Sequence:  siNA antisense region
  misc_feature (20)..(20): n stands for thymidine
  misc_feature (21)..(21): 3'-3 attached terminal deoxyabasic moeity
ggucaucuugcacaguuccnn

SEQ ID NO: 1767 - RNA, 21 nt, Artificial Sequence
  Description of Artificial Sequence:  siNA antisense region
  misc_feature (20)..(20): n stands for thymidine
  misc_feature (21)..(21): 3'-3 attached terminal deoxyabasic moeity
ccguggagaguuuuguaagnn

SEQ ID NO: 1768 - RNA, 21 nt, Artificial Sequence
  Description of Artificial Sequence:  siNA antisense region
  misc_feature (20)..(20): n stands for thymidine
  misc_feature (21)..(21): 3'-3 attached terminal deoxyabasic moeity
ggagaugguugagcagcuunn

SEQ ID NO: 1769 - RNA, 21 nt, Artificial Sequence
  Description of Artificial Sequence:  siNA antisense region
  misc_feature (20)..(20): n stands for thymidine
  misc_feature (21)..(21): 3'-3 attached terminal deoxyabasic moeity
cuguggaaggagaugguugnn

SEQ ID NO: 1770 - RNA, 21 nt, Artificial Sequence
  Description of Artificial Sequence:  siNA antisense region
  misc_feature (20)..(20): n stands for thymidine
  misc_feature (21)..(21): 3'-3 attached terminal deoxyabasic moeity
aaguucaucuucugugggunn

SEQ ID NO: 1771 - RNA, 21 nt, Artificial Sequence
  Description of Artificial Sequence:  siNA sense region
  misc_feature (1)..(1): 5'-3 attached terminal deoxyabasic moeity, inverted abasic, inverted nucleotide or other terminal cap that is optionally present
  misc_feature (20)..(20): n stands for thymidine
  misc_feature (21)..(21): 3'-3 attached terminal deoxyabasic moeity, inverted abasic, inverted nucleotide or other terminal cap that is optionally present
uucaggaccucaucauuaunn

SEQ ID NO: 1772 - RNA, 21 nt, Artificial Sequence
  Description of Artificial Sequence:  siNA antisense region
  misc_feature (20)..(20): Phosphorothioate or Phosphorodithioate 3'-Internucleotide Linkage (optionally present)
  misc_feature (21)..(21): 3'-3 attached terminal glyceryl moeity or inverted deoxyabasic (optionally present)
auaaugaugagguccugaann

SEQ ID NO: 1773 - RNA, 21 nt, Artificial Sequence
  Description of Artificial Sequence:  siNA sense region
  misc_feature (1)..(3): 2'-deoxy-2'-fluoro
  misc_feature (4)..(7): 2'-O-Methyl
  misc_feature (8)..(11): 2'-deoxy-2'-fluoro
  misc_feature (12)..(12): 2'-O-Methyl
  misc_feature (13)..(14): 2'-deoxy-2'-fluoro
  misc_feature (15)..(15): 2'-O-Methyl
  misc_feature (16)..(17): 2'-deoxy-2'-fluoro
  misc_feature (18)..(18): 2'-O-Methyl
  misc_feature (19)..(19): 2'-deoxy-2'-fluoro
  misc_feature (20)..(20): Phosphorothioate or Phosphorodithioate 3'-Internucleotide Linkage (optionally present)
  misc_feature (21)..(21): n stands for thymidine
uucaggaccucaucauuaunn

SEQ ID NO: 1774 - RNA, 21 nt, Artificial Sequence
  Description of Artificial Sequence:  siNA antisense region
  misc_feature (1)..(1): 2'-O-Methyl
  misc_feature (2)..(2): 2'-deoxy-2'-fluoro
  misc_feature (3)..(4): 2'-O-Methyl
  misc_feature (5)..(5): 2'-deoxy-2'-fluoro
  misc_feature (6)..(7): 2'-O-Methyl
  misc_feature (8)..(8): 2'-deoxy-2'-fluoro
  misc_feature (9)..(12): 2'-O-Methyl
  misc_feature (13)..(16): 2'-deoxy-2'-fluoro
  misc_feature (17)..(19): 2'-O-Methyl
  misc_feature (20)..(20): Phosphorothioate or Phosphorodithioate 3'-Internucleotide Linkage (optionally present)
  misc_feature (21)..(21): 3'-3 attached terminal glyceryl moeity or inverted deoxyabasic (optionally present)
auaaugaugagguccugaann

SEQ ID NO: 1775 - RNA, 21 nt, Artificial Sequence
  Description of Artificial Sequence:  siNA sense region
  misc_feature (1)..(3): 2'-O-Methyl or 2'-deoxy-2'-fluoro
  misc_feature (1)..(1): 5'-3 attached terminal deoxyabasic moeity, inverted abasic, inverted nucleotide or other terminal cap that is optionally present
  misc_feature (8)..(11): 2'-O-Methyl or 2'-deoxy-2'-fluoro
  misc_feature (13)..(14): 2'-O-Methyl or 2'-deoxy-2'-fluoro
  misc_feature (16)..(17): 2'-O-Methyl or 2'-deoxy-2'-fluoro
  misc_feature (19)..(19): 2'-O-Methyl or 2'-deoxy-2'-fluoro
  misc_feature (20)..(20): n stands for thymidine
  misc_feature (21)..(21): 3'-3 attached terminal deoxyabasic moeity, inverted abasic, inverted nucleotide or other terminal cap that is optionally present
uucaggaccucaucauuaunn

SEQ ID NO: 1776 - RNA, 21 nt, Artificial Sequence
  Description of Artificial Sequence:  siNA antisense region
  misc_feature (2)..(2): 2'-deoxy-2'-fluoro
  misc_feature (5)..(5): 2'-deoxy-2'-fluoro
  misc_feature (8)..(8): 2'-deoxy-2'-fluoro
  misc_feature (13)..(16): 2'-deoxy-2'-fluoro
  misc_feature (20)..(20): Phosphorothioate or Phosphorodithioate 3'-Internucleotide Linkage (optionally present)
  misc_feature (21)..(21): 3'-3 attached terminal glyceryl moeity or inverted deoxyabasic (optionally present)
auaaugaugagguccugaann

SEQ ID NO: 1777 - RNA, 21 nt, Artificial Sequence
  Description of Artificial Sequence:  siNA sense region
  misc_feature (1)..(3): 2'-deoxy-2'-fluoro
  misc_feature (1)..(1): 5'-3 attached terminal deoxyabasic moeity, inverted abasic, inverted nucleotide or other terminal cap that is optionally present
  misc_feature (4)..(7): 2'-deoxy
  misc_feature (8)..(11): 2'-deoxy-2'-fluoro
  misc_feature (12)..(12): 2'-deoxy
  misc_feature (13)..(14): 2'-deoxy-2'-fluoro
  misc_feature (15)..(15): 2'-deoxy
  misc_feature (16)..(17): 2'-deoxy-2'-fluoro
  misc_feature (18)..(18): 2'-deoxy
  misc_feature (19)..(19): 2'-deoxy-2'-fluoro
  misc_feature (20)..(20): n stands for thymidine
  misc_feature (21)..(21): 3'-3 attached terminal deoxyabasic moeity, inverted abasic, inverted nucleotide or other terminal cap that is optionally present
uucaggaccucaucauuaunn

SEQ ID NO: 1778 - RNA, 21 nt, Artificial Sequence
  Description of Artificial Sequence:  siNA sense region
  misc_feature (1)..(3): 2'-deoxy-2'-fluoro
  misc_feature (1)..(1): 5'-3 attached terminal deoxyabasic moeity, inverted abasic, inverted nucleotide or other terminal cap that is optionally present
  misc_feature (8)..(11): 2'-deoxy-2'-fluoro
  misc_feature (13)..(14): 2'-deoxy-2'-fluoro
  misc_feature (16)..(17): 2'-deoxy-2'-fluoro
  misc_feature (19)..(19): 2'-deoxy-2'-fluoro
  misc_feature (20)..(20): n stands for thymidine
  misc_feature (21)..(21): 3'-3 attached terminal deoxyabasic moeity, inverted abasic, inverted nucleotide or other terminal cap that is optionally present
uucaggaccucaucauuaunn

SEQ ID NO: 1779 - RNA, 21 nt, Artificial Sequence
  Description of Artificial Sequence:  siNA antisense region
  misc_feature (1)..(1): 2'-deoxy
  misc_feature (2)..(2): 2'-deoxy-2'-fluoro
  misc_feature (3)..(4): 2'-deoxy
  misc_feature (5)..(5): 2'-deoxy-2'-fluoro
  misc_feature (6)..(7): 2'-deoxy
  misc_feature (8)..(8): 2'-deoxy-2'-fluoro
  misc_feature (9)..(9): 2'-deoxy
  misc_feature (10)..(11): 2'-deoxy-2'-fluoro
  misc_feature (12)..(12): 2'-deoxy
  misc_feature (13)..(16): 2'-deoxy-2'-fluoro
  misc_feature (17)..(19): 2'-deoxy
  misc_feature (20)..(20): Phosphorothioate or Phosphorodithioate 3'-Internucleotide Linkage (optionally present)
  misc_feature (21)..(21): 3'-3 attached terminal glyceryl moeity or inverted deoxyabasic (optionally present)
auaaugaugagguccugaann

1. A chemically synthesized double stranded short interfering nucleic acid (siNA) molecule that directs cleavage of a BCR-ABL RNA via RNA interference (RNAi), wherein:
a) each strand of said siNA molecule is about 18 to about 23 nucleotides in length; and
b) one strand of said siNA molecule comprises nucleotide sequence having sufficient complementarity to said BCR-ABL RNA for the siNA molecule to direct cleavage of the BCR-ABL RNA via RNA interference.

2. The siNA molecule of claim 1, wherein said siNA molecule comprises no ribonucleotides.

3. The siNA molecule of claim 1, wherein said siNA molecule comprises one or more ribonucleotides.

4. The siNA molecule of claim 1, wherein one strand of said double-stranded siNA molecule comprises a nucleotide sequence that is complementary to a nucleotide sequence of a BCR-ABL gene or a portion thereof, and wherein a second strand of said double-stranded siNA molecule comprises a nucleotide sequence substantially similar to the nucleotide sequence or a portion thereof of said BCR-ABL RNA.

5. The siNA molecule of claim 4, wherein each strand of the siNA molecule comprises about 18 to about 23 nucleotides, and wherein each strand comprises at least about 19 nucleotides that are complementary to the nucleotides of the other strand.

6. The siNA molecule of claim 1, wherein said siNA molecule comprises an antisense region comprising a nucleotide sequence that is complementary to a nucleotide sequence of a BCR-ABL gene or a portion thereof, and wherein said siNA further comprises a sense region, wherein said sense region comprises a nucleotide sequence substantially similar to the nucleotide sequence of said BCR-ABL gene or a portion thereof.

7. The siNA molecule of claim 6, wherein said antisense region and said sense region comprise about 18 to about 23 nucleotides, and wherein said antisense region comprises at least about 18 nucleotides that are complementary to nucleotides of the sense region.

8. The siNA molecule of claim 1, wherein said siNA molecule comprises a sense region and an antisense region, and wherein said antisense region comprises a nucleotide sequence that is complementary to a nucleotide sequence of RNA encoded by a BCR-ABL gene, or a portion thereof, and said sense region comprises a nucleotide sequence that is complementary to said antisense region.

9. The siNA molecule of claim 6, wherein said siNA molecule is assembled from two separate oligonucleotide fragments wherein one fragment comprises the sense region and a second fragment comprises the antisense region of said siNA molecule.

10. The siNA molecule of claim 6, wherein said sense region is connected to the antisense region via a linker molecule.

11. The siNA molecule of claim 10, wherein said linker molecule is a polynucleotide linker.

12. The siNA molecule of claim 10, wherein said linker molecule is a non-nucleotide linker.

13. The siNA molecule of claim 6, wherein pyrimidine nucleotides in the sense region are 2′-O-methyl pyrimidine nucleotides.

14. The siNA molecule of claim 6, wherein purine nucleotides in the sense region are 2′-deoxy purine nucleotides.

15. The siNA molecule of claim 6, wherein pyrimidine nucleotides present in the sense region are 2′-deoxy-2′-fluoro pyrimidine nucleotides.

16. The siNA molecule of claim 9, wherein the fragment comprising said sense region includes a terminal cap moiety at a 5′-end, a 3′-end, or both of the 5′ and 3′ ends of the fragment comprising said sense region.

17. The siNA molecule of claim 16, wherein said terminal cap moiety is an inverted deoxy abasic moiety.

18. The siNA molecule of claim 6, wherein pyrimidine nucleotides of said antisense region are 2′-deoxy-2′-fluoro pyrimidine nucleotides.

19. The siNA molecule of claim 6, wherein purine nucleotides of said antisense region are 2′-O-methyl purine nucleotides.

20. The siNA molecule of claim 6, wherein purine nucleotides present in said antisense region comprise 2′-deoxy-purine nucleotides.

21. The siNA molecule of claim 18, wherein said antisense region comprises a phosphorothioate internucleotide linkage at the 3′ end of said antisense region.

22. The siNA molecule of claim 6, wherein said antisense region comprises a glyceryl modification at a 3′ end of said antisense region.

23. The siNA molecule of claim 9, wherein each of the two fragments of said siNA molecule comprise about 21 nucleotides.

24. The siNA molecule of claim 23, wherein about 19 nucleotides of each fragment of the siNA molecule are base-paired to the complementary nucleotides of the other fragment of the siNA molecule and wherein at least two 3′ terminal nucleotides of each fragment of the siNA molecule are not base-paired to the nucleotides of the other fragment of the siNA molecule.

25. The siNA molecule of claim 24, wherein each of the two 3′ terminal nucleotides of each fragment of the siNA molecule are 2′-deoxy-pyrimidines.

26. The siNA molecule of claim 25, wherein said 2′-deoxy-pyrimidine is 2′-deoxy-thymidine.

27. The siNA molecule of claim 23, wherein all of the about 21 nucleotides of each fragment of the siNA molecule are base-paired to the complementary nucleotides of the other fragment of the siNA molecule.

28. The siNA molecule of claim 23, wherein about 19 nucleotides of the antisense region are base-paired to the nucleotide sequence of the RNA encoded by a BCR-ABL gene or a portion thereof.

29. The siNA molecule of claim 23, wherein about 21 nucleotides of the antisense region are base-paired to the nucleotide sequence of the RNA encoded by a BCR-ABL gene or a portion thereof.

30. The siNA molecule of claim 9, wherein a 5′-end of the fragment comprising said antisense region optionally includes a phosphate group.

31. A composition comprising the siNA molecule of claim 1 in an pharmaceutically acceptable carrier or diluent.

32. A siNA according to claim 1 wherein the BCR-ABL RNA comprises Genbank Accession No. NM_{—}004327 (BCR), NM_{—}005157 (ABL), or HSA131467 (b2a2).

33. A siNA according to claim 1 wherein said siNA comprises any of SEQ ID NOs 1-1236, 1589-1596, 1601-1648, or 1682-1690.

34. A composition comprising the siNA of claim 32 together with a pharmaceutically acceptable carrier or diluent.

35. A composition comprising the siNA of claim 33 together with a pharmaceutically acceptable carrier or diluent.
